(19) United States
(12) Patent Application Publication
(10) Pub. No.: US 2008/0222750 A1
(43) Pub. Date: Sep. 11, 2008

(54) NONVIRAL VECTORS FOR DELIVERING POLYNUCLEOTIDES TO PLANTS

(75) Inventor: Shaharyar Khan, Charlottesville, VA (US)

Correspondence Address: PATREA L. PABST;PABST PATENT GROUP LLP, 400 COLONY SQUARE, SUITE 1200, 1201 PEACHTREE STREET, ATLANTA, GA, 30361, US

(73) Assignee: Gencia Corporation

(21) Appl. No.: 11/930,892

(22) Filed: Oct. 31, 2007

Related U.S. Application Data
(63) Continuation-in-part of application No. 10/972,963, filed on Oct. 25, 2004.
(60) Provisional application No. 60/568,436, filed on May 5, 2004.
(60) Provisional application No. 60/513,983, filed on Oct. 24, 2003.

(51) Int. Cl. C12N 15/29; C12N 15/82

(52) U.S. Cl. 800/278; 435/468

(57) ABSTRACT

Methods and compositions for delivering polynucleotides are provided. One embodiment provides a non-viral vector comprising a recombinant polynucleotide-binding protein comprising a protein transduction domain operably linked to a targeting signal. Methods for modifying the genome of non-nuclear organelles are also provided.

### CROSS-REFERENCE TO RELATED APPLICATIONS

[0001] This application is a continuation-in-part application of U.S. patent application Ser. No. 10/972,963 filed on Oct. 25, 2004, which claims priority to U.S. Provisional Application No. 60/568,436 filed on May 5, 2004, and U.S. Provisional Application No. 60/513,983 filed on Oct. 24, 2003, and where permissible each of which is incorporated by reference in their entirety.

### STATEMENT REGARDING FEDERALLY SPONSORED RESEARCH OR DEVELOPMENT

[0002] Aspects of the following disclosure were supported in part by NIA-NIA SBIR grant number AG022780. Therefore, the United States has certain rights in the disclosure.

### INCORPORATION BY REFERENCE

[0003] This application incorporates by reference in its entirety the sequence listing, filename GNC003CIP_{—}2_ST25.txt, on the accompanying computer readable medium filed electronically with this application. The file was created on or about Oct. 31, 2007, and is about 701 Kb.

### FIELD OF THE INVENTION

[0004] The present disclosure is generally directed to compositions and methods for the delivery of polynucleotides and polypeptides, more particularly to compositions and methods for transfection, for example transfection of plants and organelles in plants.

### BACKGROUND OF THE INVENTION

[0005] Plant cells have three gene-containing compartments: the nucleus, mitochondria and plastids. There are several types of plastid including: (1) chlorophyll-containing chloroplasts; (2) yellow, orange or red carotenoid-containing chromoplasts; (3) starch-storing amyloplasts; (4) oil-containing elaioplasts; (5) proplastids (plastid precursors found in most plant cells); and (6) etioplasts (partially developed chloroplasts that form in dark-grown seedlings). Each plastid creates multiple copies of the 75-250 kilo bases plastid genome. The number of genome copies per plastid is flexible, ranging from more than 1000 in rapidly dividing cells, which generally contain few plastids, to 100 or fewer in mature cells, where plastid divisions has given rise to a large number of plastids. The plastid genome contains about 100 genes encoding ribosomal and transfer ribonucleic acids (rRNAs and tRNAs) as well as proteins involved in photosynthesis and plastid gene transcription and translation. Most plants inherit the plastids from only one parent. Angiosperms generally inherit plastids from the mother, while many gymnosperms inherit plastids from the father. Algae also inherit plastids from only one parent. This fact allows for gene manipulation in plastids as a means of controlling inadvertent gene dispersion, a concern in genetically modified plant agriculture.

[0006] The various forms of plastid (amyloplasts, chromoplasts, etc.) have desirable properties as places to conduct reactions and to accumulate proteins or products of enzymes, and they can be exploited using the embodiments provided. Some syntheses other than photosynthesis are only carried out in plastids, probably because one or another feature of the organelle's environment does not exist elsewhere in the cell. Furthermore, the cytoplasm and chloroplast contain different proteases, and a protein might survive better in one compartment than in the other. A specific type of plastid might be a good place to accumulate certain proteins or their biosynthetic products that would be harmful if they were present in large amounts in the cytoplasm or in a plastid of a different type.

[0007] Mitochondria in plants, as in other eukaryotes, play an essential role in the cell as the major producers of ATP via oxidative phosphorylation in addition, mitochondria are involved in numerous other metabolic processes including the biosynthesis of amino acids, vitamin cofactors, fatty acids, and iron-sulphur clusters. Plant mitochondria also play crucial roles in many other aspects of plant development, performance, cell death and possess an array of unique properties which allow them to interact with the specialized features of plant cell metabolism. This includes regulation of oxidative stress during infection and pathogen attack and modulating plant responses as a means of survival during stresses such as cold temperatures, drought, and nutrient limitation. Furthermore, plant mitochondria and the accumulation of mutations in plant mitochondrial genomes, may serve as the cause of plant aging.

[0008] In comparison to plastid genomes, the size of plant mitochondrial genomes is quite variable. Furthermore, plant mitochondrial genomes can be variable even within the same plant cell, a term referred to as heteroplasmy. Owing to robust recombination rates, the plant mitochondrial genome is a highly complex structure composed of small circular and large circularly permuted DNA molecules. Plant mitochondrial genomes encode for a host of proteins and RNAs involved in various plant cell processes including oxidative phosphorylation. In the course of evolution, many organisms tackled the task of introducing macromolecules into living cells. Aside from the cell-specific, usually receptor-mediated or active uptake mechanisms, the general solution that has independently emerged in many lineages relies on peptides specifically evolved to interact with, and insert into lipid bilayer membranes. Thus, bacterial colicins, human porins, and protein transduction domains (PTDs) from diverse species share the motif of a positively charged alpha-helix, frequently with an amphipathic structure, which is capable of inserting into lipid membranes, and delivering larger cargoes intracellularly. Recent research reports confirm the successful use of PTDs fused to proteins for their delivery across biological boundaries, including the blood-brain barrier, and the placenta.

[0009] Another issue of great importance in the delivery of macromolecules in organisms is the need to protect them from proteolytic, nucleolytic and immune degradation and removal while traversing extracellular spaces. An often used approach is coating DNA with proteins capable of surviving the harsh journey to the target. Viral capsid proteins have been quite successful, yet for the purpose of DNA delivery in humans they suffer from a significant drawback—immunogenicity, the capacity to evoke a strong immune reaction greatly reducing the effectiveness of gene therapy.

[0010] Thus, there is a need for improved compositions and methods for the delivery of polynucleotides to the interior of a cell.

### SUMMARY OF THE INVENTION

[0011] Non-viral polynucleotide delivery vehicles and methods of their use are provided. In general, the disclosure provides modified polynucleotide-binding proteins comprising a protein transduction domain operably linked to a targeting signal, for example a non-nuclear organelle targeting signal. One aspect provides a polypeptide comprising at least one HMG box domain, more typically at least two HMG box domains and optionally at least one protein transduction domain. The polypeptide can associate with a polynucleotide causing the polynucleotide to condense. The polypeptide can also coat the polynucleotide. Coating and/or condensing the polynucleotide helps protect the polynucleotide from degradation. The protein transduction domain helps the polypeptide-polynucleotide complex cross membranes and enter the interior of a cell or an organelle. The targeting signal helps direct the complex to a site of interest and thereby deliver the polynucleotide.

[0012] The disclosed compositions can be used to deliver polynucleotides to specific locations within a plant cell, including but not limited to plastids, plant mitochondria and plant nuclei. In some aspects, the polynucleotides encode a biosynthetic protein(s) or a protein(s) that compensates for resistance to environmental stress. Accordingly, some aspects provide methods for modifying plants.

### BRIEF DESCRIPTION OF THE DRAWINGS

[0013] FIG. 1 is a diagram of one exemplary plasmid design (left) and exemplary protein structure (right) for TFAM with a PTD domain followed by a MLS.

### DETAILED DESCRIPTION

### 1. Definitions

[0014] In describing and claiming the disclosed subject matter, the following terminology will be used in accordance with the definitions set forth below.

[0015] The term “polypeptides” includes proteins and fragments thereof. Polypeptides are disclosed herein as amino acid residue sequences. Those sequences are written left to right in the direction from the amino to the carboxy terminus. In accordance with standard nomenclature, amino acid residue sequences are denominated by either a three letter or a single letter code as indicated as follows: Alanine (Ala, A), Arginine (Arg, R), Asparagine (Asn, N), Aspartic Acid (Asp, D), Cysteine (Cys, C), Glutamine (Gln, Q), Glutamic Acid (Glu, E), Glycine (Gly, G), Histidine (H is, H, Isoleucine (Ile, I), Leucine (Leu, L), Lysine (Lys, K), Methionine (Met, M), Phenylalanine (Phe, F), Proline (Pro, P), Serine (Ser, S), Threonine (Thr, T), Tryptophan (Trp, W), Tyrosine (Tyr, Y), and Valine (Val, V).

[0016] “Variant” refers to a polypeptide or polynucleotide that differs from a reference polypeptide or polynucleotide, but retains essential properties. A typical variant of a polypeptide differs in amino acid sequence from another, reference polypeptide. Generally, differences are limited so that the sequences of the reference polypeptide and the variant are closely similar overall and, in many regions, identical. A variant and reference polypeptide may differ in amino acid sequence by one or more modifications (e.g., substitutions, additions, and/or deletions). A substituted or inserted amino acid residue may or may not be one encoded by the genetic code. A variant of a polypeptide may be naturally occurring such as an allelic variant, or it may be a variant that is not known to occur naturally.

[0017] Modifications and changes can be made in the structure of the polypeptides of in disclosure and still obtain a molecule having similar characteristics as the polypeptide (e.g., a conservative amino acid substitution). For example, certain amino acids can be substituted for other amino acids in a sequence without appreciable loss of activity. Because it is the interactive capacity and nature of a polypeptide that defines that polypeptide's biological functional activity, certain amino acid sequence substitutions can be made in a polypeptide sequence and nevertheless obtain a polypeptide with like properties.

[0018] In making such changes, the hydropathic index of amino acids can be considered. The importance of the hydropathic amino acid index in conferring interactive biologic function on a polypeptide is generally understood in the art. It is known that certain amino acids can be substituted for other amino acids having a similar hydropathic index or score and still result in a polypeptide with similar biological activity. Each amino acid has been assigned a hydropathic index on the basis of its hydrophobicity and charge characteristics. Those indices are: isoleucine (+4.5); valine (+4.2); leucine (+3.8); phenylalanine (+2.8); cysteine/cysteine (+2.5); methionine (+1.9); alanine (+1.8); glycine (−0.4); threonine (−0.7); serine (−0.8); tryptophan (−0.9); tyrosine (−1.3); proline (−1.6); histidine (−3.2); glutamate (−3.5); glutamine (−3.5); aspartate (−3.5); asparagine (−3.5); lysine (−3.9); and arginine (−4.5).

[0019] It is believed that the relative hydropathic character of the amino acid determines the secondary structure of the resultant polypeptide, which in turn defines the interaction of the polypeptide with other molecules, such as enzymes, substrates, receptors, antibodies, antigens, and the like. It is known in the art that an amino acid can be substituted by another amino acid having a similar hydropathic index and still obtain a functionally equivalent polypeptide. In such changes, the substitution of amino acids whose hydropathic indices are within ±2 is preferred, those within ±1 are particularly preferred, and those within ±0.5 are even more particularly preferred.

[0020] Substitution of like amino acids can also be made on the basis of hydrophilicity, particularly, where the biological functional equivalent polypeptide or peptide thereby created is intended for use in immunological embodiments. The following hydrophilicity values have been assigned to amino acid residues: arginine (+3.0); lysine (+3.0); aspartate (+3.0±1); glutamate (+3.0±1); serine (+0.3); asparagine (+0.2); glutamine (+0.2); glycine (0); proline (−0.5±1); threonine (−0.4); alanine (−0.5); histidine (−0.5); cysteine (−1.0); methionine (−1.3); valine (−1.5); leucine (−1.8); isoleucine (−1.8); tyrosine (−2.3); phenylalanine (−2.5); tryptophan (−3.4). It is understood that an amino acid can be substituted for another having a similar hydrophilicity value and still obtain a biologically equivalent, and in particular, an immunologically equivalent polypeptide. In such changes, the substitution of amino acids whose hydrophilicity values are within ±2 is preferred, those within ±1 are particularly preferred, and those within ±0.5 are even more particularly preferred.

[0021] As outlined above, amino acid substitutions are generally based on the relative similarity of the amino acid side-chain substituents, for example, their hydrophobicity, hydrophilicity, charge, size, and the like. Exemplary substitutions that take various of the foregoing characteristics into consideration are well known to those of skill in the art and include (original residue: exemplary substitution): (Ala: Gly, Ser), (Arg: Lys), (Asn: Gln, H is), (Asp: Glu, Cys, Ser), (Gln: Asn), (Glu: Asp), (Gly: Ala), (His: Asn, Gln), (IIe: Leu, Val), (Leu: Ile, Val), (Lys: Mg), (Met: Leu, Tyr), (Ser: Thr), (Thr: Ser), (Tip: Tyr), (Tyr: Trp, Phe), and (Val: IIe, Leu). Embodiments of this disclosure thus contemplate functional or biological equivalents of a polypeptide as set forth above. In particular, embodiments of the polypeptides can include variants having about 50%, 60%, 70%, 80%, 90%, and 95% sequence identity to the polypeptide of interest.

[0022] “Identity,” as known in the art, is a relationship between two or more polypeptide sequences, as determined by comparing the sequences. In the art, “identity” also means the degree of sequence relatedness between polypeptide as determined by the match between strings of such sequences. “Identity” and “similarity” can be readily calculated by known methods, including, but not limited to, those described in (Computational Molecular Biology, Lesk A. M., Ed., Oxford University Press, New York, 1988; Biocomputing: Informatics and Genome Projects, Smith, D. W., Ed., Academic Press, New York, 1993; Computer Analysis of Sequence Data, Part I, Griffin, A. M, and Griffin, H. G., Eds., Humana Press, New Jersey, 1994; Sequence Analysis in Molecular Biology, von Heinje, G., Academic Press, 1987; and Sequence Analysis Primer, Gribskov, M and Devereux, J., Eds., M Stockton Press, New York, 1991; and Carillo, H, and Lipman, D., SIAM J Applied Math., 48: 1073 (1988).

[0023] Preferred methods to determine identity are designed to give the largest match between the sequences tested. Methods to determine identity and similarity are codified in publicly available computer programs. The percent identity between two sequences can be determined by using analysis software (i.e., Sequence Analysis Software Package of the Genetics Computer Group, Madison Wis.) that incorporates the Needelman and Wunsch, (J. Mol. Biol., 48: 443-453, 1970) algorithm (e.g., NBLAST, and XBLAST). The default parameters are used to determine the identity for the polypeptides of the present disclosure.

[0024] By way of example, a polypeptide sequence may be identical to the reference sequence, that is be 100% identical, or it may include up to a certain integer number of amino acid alterations as compared to the reference sequence such that the % identity is less than 100%. Such alterations are selected from: at least one amino acid deletion, substitution, including conservative and non-conservative substitution, or insertion, and wherein said alterations may occur at the amino- or carboxy-terminal positions of the reference polypeptide sequence or anywhere between those terminal positions, interspersed either individually among the amino acids in the reference sequence or in one or more contiguous groups within the reference sequence. The number of amino acid alterations for a given % identity is determined by multiplying the total number of amino acids in the reference polypeptide by the numerical percent of the respective percent identity (divided by 100) and then subtracting that product from said total number of amino acids in the reference polypeptide.

[0025] As used herein, the term “low stringency” refers to conditions that permit a polynucleotide or polypeptide to bind to another substance with little or no sequence specificity.

[0026] As used herein, the term “purified” and like terms relate to the isolation of a molecule or compound in a form that is substantially free (at least 60% free, preferably 75% free, and most preferably 90% free) from other components normally associated with the molecule or compound in a native environment.

[0027] As used herein, the term “pharmaceutically acceptable carrier” encompasses any of the standard pharmaceutical carriers, such as a phosphate buffered saline solution, water and emulsions such as an oil/water or water/oil emulsion, and various types of wetting agents.

[0028] As used herein, the term “treating” includes alleviating the symptoms associated with a specific disorder or condition and/or preventing or eliminating said symptoms.

[0029] “Operably linked” refers to a juxtaposition wherein the components are configured so as to perform their usual function. For example, control sequences or promoters operably linked to a coding sequence are capable of effecting the expression of the coding sequence, and an organelle localization sequence operably linked to protein will direct the linked protein to be localized at the specific organelle.

[0030] “Localization Signal or Sequence or Domain” or “Targeting Signal or Sequence or Domain” are used interchangeably and refer to a signal that directs a molecule to a specific cell, tissue, organelle, or intracellular region. The signal can be polynucleotide, polypeptide, or carbohydrate moiety or can be an organic or inorganic compound sufficient to direct an attached molecule to a desired location. Exemplary organelle localization signals include nuclear localization signals known in the art and other organelle localization signals known in the art such as those provided in Tables 1 and 2 and described in Emanuelson et al., Predicting Subcellular Localization of Proteins Based on Their N-terminal Amino Acid Sequence. Journal of Molecular Biology. 300(4):1005-16, 2000 Jul. 21, and in Cline and Henry, Import and Routing of Nucleus-encoded Chloroplast Proteins. Annual Review of Cell & Developmental Biology. 12:1-26, 1996, the disclosures of which are incorporated herein by reference in their entirety. It will be appreciated that the entire sequence listed in Tables 1 and 2 need not be included, and modifications including truncations of these sequences are within the scope of the disclosure provided the sequences operate to direct a linked molecule to a specific organelle. Organelle localization signals of the present disclosure can have 80 to 100% homology to the sequences in Tables 1 and 2. One class of suitable organelle localization signals include those that do not interact with the targeted organelle in a receptor:ligand mechanism. For example, organelle localization signals include signals having or conferring a net charge, for example a positive charge. Positively charged signals can be used to target negatively charged organelles such as the chloroplast and plant mitochondrion. Negatively charged signals can be used to target positively charged organelles.

[0031] “Protein Transduction Domain” or PTD refers to a polypeptide, polynucleotide, carbohydrate, or organic or inorganic compounds that facilitates traversing a lipid bilayer, micelle, cell membrane, organelle membrane, or vesicle membrane. A PTD attached to another molecule facilitates the molecule traversing membranes, for example going from extracellular space to intracellular space, or cytosol to within an organelle. Exemplary PTDs include but are not limited to HIV TAT YGRKKRRQRRR (SEQ. ID NO. 1) or RKKRRQRRR (SEQ. ID NO. 2); 11 Arginine residues, or positively charged polypeptides or polynucleotides having 8-15 residues, preferably 9-11 residues.

[0032] As used herein, the term “exogenous DNA” or “exogenous nucleic acid sequence” or “exogenous polynucleotide” refers to a nucleic acid sequence that was introduced into a cell or organelle from an external source. Typically the introduced exogenous sequence is a recombinant sequence.

[0033] As used herein, the term “transfection” refers to the introduction of a nucleic acid sequence into the interior of a membrane enclosed space of a living cell, including introduction of the nucleic acid sequence into the cytosol of a cell as well as the interior space of a mitochondria, nucleus or chloroplast. The nucleic acid may be in the form of naked DNA or RNA, associated with various proteins or the nucleic acid may be incorporated into a vector.

[0034] As used herein, the term “vector” is used in reference to a vehicle used to introduce a nucleic acid sequence into a cell. A viral vector is virus that has been modified to allow recombinant DNA sequences to be introduced into host cells or cell organelles.

[0035] As used herein, the term “organelle” refers to cellular membrane bound structures such as the plastid, mitochondrion, and nucleus. The term “organelle” includes natural and synthetic organelles.

[0036] As used herein, the term “plastid” refers to any cellular membrane bound structure present in a plant cell, which possesses its own DNA. Chloroplasts, Etioplasts, Chromoplasts, Leucoplast, Amyloplasts, Statoliths, Elaioplasts and Proteinoplasts are examples of plastids.

[0037] As used herein, the term “non-nuclear organelle” refers to any cellular membrane bound structure present in a cell, except the nucleus.

[0038] As used herein, the term “polynucleotide” generally refers to any polyribonucleotide or polydeoxyribonucleotide, which may be unmodified RNA or DNA or modified RNA or DNA. Thus, for instance, polynucleotides as used herein refers to, among others, single- and double-stranded DNA, DNA that is a mixture of single- and double-stranded regions, single- and double-stranded RNA, and RNA that is mixture of single- and double-stranded regions, hybrid molecules comprising DNA and RNA that may be single-stranded or, more typically, double-stranded or a mixture of single- and double-stranded regions. The term “nucleic acid” or “nucleic acid sequence” also encompasses a polynucleotide as defined above.

[0039] In addition, polynucleotide as used herein refers to triple-stranded regions comprising RNA or DNA or both RNA and DNA. The strands in such regions may be from the same molecule or from different molecules. The regions may include all of one or more of the molecules, but more typically involve only a region of some of the molecules. One of the molecules of a triple-helical region often is an oligonucleotide.

[0040] As used herein, the term polynucleotide includes DNAs or RNAs as described above that contain one or more modified bases. Thus, DNAs or RNAs with backbones modified for stability or for other reasons are “polynucleotides” as that term is intended herein. Moreover, DNAs or RNAs comprising unusual bases, such as inosine, or modified bases, such as tritylated bases, to name just two examples, are polynucleotides as the term is used herein.

[0041] It will be appreciated that a great variety of modifications have been made to DNA and RNA that serve many useful purposes known to those of skill in the art. The term polynucleotide as it is employed herein embraces such chemically, enzymatically or metabolically modified forms of polynucleotides, as well as the chemical forms of DNA and RNA characteristic of viruses and cells, including simple and complex cells, inter alia.

[0042] “Oligonucleotide(s)” refers to relatively short polynucleotides. Often the term refers to single-stranded deoxyribonucleotides, but it can refer as well to single- or double-stranded ribonucleotides, RNA:DNA hybrids and double-stranded DNAs, among others.

[0043] The term “episome” refers to a polynucleotide sufficient to allow recombination into an organelle genome, optionally including inserted genes, regulatory regions or coding regions.

[0044] The term “multicistronic” refers to a polynucleotide possessing more than one coding region to produce more than one protein from the same polynucleotide.

[0045] The term “operon” refers to a polynucleotide possessing at least one coding region transcribed from a single promoter.

### 2. Modified Polynucleotide Binding or Polynucleotide-Packaging Polypeptides

[0046] A. Polynucleotide Binding Domain

[0047] The compositions and methods for the delivery of cargo, for example a polynucleotide, provided herein include polynucleotide-binding polypeptides or polynucleotide-packaging polypeptides optionally having a PTD and optionally having a targeting signal or domain. The modified or recombinant polypeptide can be any polypeptide known to bind or package a polynucleotide or a variant thereof. The recombinant polypeptide can be used as therapeutic agent either alone or in combination with a polynucleotide. In one embodiment, the polynucleotide-binding polypeptide includes at least a portion of a member of the high mobility group (HMG) of proteins, in particular at least one HMG box domain. Generally, the HMG domain includes a global fold of three helices stabilized in an ‘L-shaped’ configuration by two hydrophobic cores. The high mobility group chromosomal proteins HMG1 or HMG2, which are common to all eukaryotes, bind DNA in a non-sequence-specific fashion, for example to promote chromatin function and gene regulation. They can interact directly with nucleosomes and are believed to be modulators of chromatin structure. They are also important in activating a number of regulators of gene expression, including p53, Hox transcription factors and steroid hormone receptors, by increasing their affinity for DNA. HMG proteins include HMG-1/2, HMG-I(Y) and HMG-14/17.

[0048] The HMG-1/2-box proteins can be further distinguished into three subfamilies according to the number of HMO domains present in the protein, their specific of sequence recognition and their evolutionary relationship. The first group contains chromosomal proteins bound to DNA with no sequence specificity (class I, HMG1 and HMG2), the second contains ribosomal and mitochondrial transcription factors which show sequence specificity in the presence of another associating factor when bound with DNA (class II, yeast ARS binding protein ABF-2, UBF and mitochondrial transcription factor mtTF-1), and the third contains gene-specific transcription factors which show sequence specific DNA binding (class III, lymphoid enhancer-binding factors LEF-1 and TCF-1; the mammalian sex-determining factor SRY, and the closely related SOX proteins; and the fungal regulatory proteins Mat-MC, Mat-a1, Stel1 and Rox1). The HMG1/2-box DNA binding domain is about 75 to about 80 amino acids and contains highly conserved proline, aromatic and basic residues. Common properties of HMG domain proteins include interaction with the minor groove of the DNA helix, binding to irregular DNA structure, and the capacity to modulate DNA structure by bending.

[0049] SOX (SRY-type HMG box) proteins have critical functions in a number of developmental processes, including sex determination, skeleton formation, pre-B and T cell development and neural induction. SOX9 plays a direct role during chondrogenesis by binding and activating the chondrocyte-spacific enhancer of the Col2a1 gene. Loss of SOX9 gene function leads to the genetic condition known as Campomelic Dysplsia (CD), a form of dwarfism characterized by extreme skeletal malformation, and one in which three-quarters of XY individual are either intersexes or exhibit male to female sex reversal. There are more than 20 members cloned in SOX family. All of which contain an HMG domain, which can bind specifically to the double strand DNA motif and shares >50% identify with the HMG domain of SRY, the human testis-determining factor. The preferred DNA-binding site of SOX9 have been defined to be AGAACAATGG, which contains the SOX core-binding element (SCBE), AACAAT, flanking 5′ AG and 3′ GG nucleotides enhance binding by SOX9.

[0050] In one embodiment, the recombinant polynucleotide-binding protein has at least one HMG box domain, generally at least two, more particularly 2-5 HMG box domains. The HMG box domain can bind to an AT rich DNA sequence, for example, using a large surface on the concave face of the protein, to bind the minor groove of the DNA. This binding bends the DNA helix axis away from the site of contact. The first and second helices contact the DNA, their N-termini fitting into the minor groove whereas helix 3 is primarily exposed to solvent. Partial intercalation of aliphatic and aromatic residues in helix 2 occurs in the minor groove.

[0051] In other embodiments, the polynucleotide binding polypeptide can have at least one polynucleotide binding domain, typically two or more polynucleotide binding domains. The polynucleotide binding domains can be the same or different. For example, the polynucleotide-binding polypeptide can include at least on HMO box in combination with one or more DNA binding domains selected from the group consisting of an HMG box, homeodomain and POU domain; zinc finger domain such as C₂H₂ and C₂C₂; amphipathic helix domain such as leucine zipper and helix-loop-helix domains; and histone folds. The polynucleotide binding domain can be specific for a specific polynucleotide sequence, or preferably non-specifically binds to a polynucleotide. Alternatively, the polynucleotide-binding polypeptide can have more a combination of at least one polynucleotide binding domain that binds in a sequence specific manner and at least one polynucleotide binding-domain that binds DNA non-specifically.

[0052] Certain embodiments provide modified polynucleotide-binding polypeptides having a helix-turn-helix motif or at least a polynucleotide binding region of a helix-turn-helix protein. Helix-turn-helix proteins have a similar structure to bacterial regulatory proteins such as the 1 repressor and cro proteins, the lac repressor and so on which bind as dimers and their binding sites are palindromic. They contain 3 a helical regions separated by short turns which is why they are called helix-turn-helix proteins. One protein helix (helix 3) in each subunit of the dimer occupies the major groove of two successive turns of the DNA helix. Thus, in another embodiment, the disclosed polynucleotide-binding polypeptides can form dimers or other multi-component complexes, and have 1 to 3 helices.

[0053] In yet another embodiments the modified polynucleotide-binding polypeptide includes a homeodomain or a portion of a homeodomain protein. Homeodomain proteins bind to a sequence of 180 base pairs initially identified in a group of genes called homeotic genes. Accordingly, the sequence was called the homeobox. The 180 bp corresponds to 60 amino acids in the corresponding protein. This protein domain is called the homeodomain. Homeodomain-containing proteins have since been identified in a wide range of organisms including vertebrates and plants. The homeodomain shows a high degree of sequence conservation. The homeodomain contains 4α helical regions. Helices II and III are connected by 3 amino acids comprising a turn. This region has a very similar structure to helices II and III of bacterial DNA binding proteins.

[0054] Yet another embodiment provides a modified polynucleotide-binding polypeptide having a zinc finger domain or at least a portion of a zinc finger protein. Zinc finger proteins have a domain with the general structure: Phe (sometimes Tyr)-Cys-2 to 4 amino acids-Cys-3 amino acids-Phe (sometimes Tyr)-5 amino acids-Leu-2 amino acids-His-3 amino acids-His. The phenylalanine or tyrosine residues which occur at invariant positions are required for DNA binding. Similar sequences have been found in a range of other DNA binding proteins though the number of fingers varies. For example, the SP1 transcription factor which binds to the GC box found in the promoter proximal region of a number of genes has 3 fingers. This type of zinc finger which has 2 cysteines and 2 histidines is called a C₂H₂ zinc finger.

[0055] Another type of zinc finger which binds zinc between 2 pairs of cysteines has been found in a range of DNA binding proteins. The general structure of this type of zinc finger is: Cys-2 amino acids-Cys-13 amino acids-Cys-2 amino acids-Cys. This is called a C₂C₂ zinc finger. It is found in a group of proteins known as the steroid receptor superfamily, each of which has 2 C₂C₂ zinc fingers.

[0056] Another embodiment provides a modified polynucleotide-binding polypeptide having a leucine zipper or at least a portion of a leucine zipper protein. The first leucine zipper protein was identified from extracts of liver cells, and it was called C/EBP because it is an enhancer binding protein and it was originally thought to bind to the CAAT promoter proximal sequence. C/EBP will only bind to DNA as a dimer. The region of the protein where the two monomers join to make the dimer is called the dimerization domain. This lies towards the C-terminal end of the protein. When the amino acid sequence was examined it was found that a leucine residue occurs every seventh amino acid over a stretch of 35 amino acids. If this region were to form an a helix then all of these leucines would align on one face of the helix.

[0057] Because leucine has a hydrophobic side chain, one face of the helix is very hydrophobic. The opposite face has amino acids with charged side chains which are hydrophilic. The combination of hydrophobic and hydrophilic characteristics gives the molecule is amphipathic moniker. Adjacent to the leucine zipper region is a region of 20-30 amino acids which is rich in the basic (positively charged) amino acids lysine and arginine. This is the DNA binding domain—often referred to as the bZIP domain—the basic region of the leucine zipper. C/EBP is thought to bind to DNA by these bZIP regions wrapping round the DNA helix

[0058] The leucine zipper—bZIP structure has been found in a range of other proteins including the products of the jun and fos oncogenes. Whereas C/EBP binds to DNA as a homodimer of identical subunits, fos cannot form homodimers at all and jun/jun homodimers tend to be unstable. However fos/jun heterodimers are much more stable. These fos/jun heterodimers correspond to a general transcription factor called AP1 which binds to a variety of promoters and enhancers and activates transcription. The consensus AP1 binding site is TGACTCA (SEQ. ID. NO.: 3) which is palindromic.

[0059] Another embodiment provides a modified polynucleotide-binding polypeptide having helix-loop-helix domain or a polynucleotide binding portion of a helix-loop-helix protein. Helix-loop-helix proteins are similar to leucine zippers in that they form dimers via amphipathic helices. They were first discovered as a class of proteins when a region of similarity was noticed between two enhancer binding proteins called E47 and E12. This conserved region has the potential to form two amphipathic separated by a loop hence helix-loop-helix. Next to the dimerization domain is a DNA binding domain, again rich in basic amino acids and referred to as the bHLH domain. These structures are also found in a number of genes required for development of the Drosophila nervous system—the Achaete-scute complex, and in a protein called MyoD which is required for mammalian muscle differentiation.

[0060] In still another embodiment, the modified polynucleotide binding polypeptide includes a histone polypeptide, a fragment of a histone polypeptide, or at least one histone fold. Histone folds exist in histone polypeptides monomers assembled into dimers. Hilstone polypeptides include H2A, H₂B, H3, and H4 which can form heterodimers H2A-2B and H3-H4. It will be appreciated that histone-like polypeptides can also be used in the disclosed compositions and methods. Histone-like polypeptides include, but are not limited to, HMf or the histone from Methanothermous fervidus, other archaeal histones known in the art, and histone-fold containing polypeptides such as MJ1647, CBF, TAFII or transcription factor IID, SPT3, and Dr1-DRAP (Sanderman, K. et al. (1998) CMLS. Cell. Mol. Life. Sci. 54:1350-1364, which is incorporated by reference in its entirety).

[0061] One embodiment, among others, provides a non-histone polynucleotide-binding polypeptide, for example a polynucleotide-binding polypeptide comprising mitochondrial transcription factor A (TFAM) polypeptide, a variant thereof, or a fragment thereof sufficient to bind polynucleotides. Variant TFAM can have 80%, 85%, 90%, 95%, 99% or greater sequence identity with a reference TFAM, for example naturally occurring TFAM.

[0062] TFAM is a member of the high mobility group (HMG) of proteins having two HMG-box domains. TFAM as well as other HMG proteins bind, wrap, bend, and unwind DNA. Thus, embodiments of the present disclosure include polynucleotide binding polypeptides comprising one or more polynucleotide binding regions of the HMG family of proteins, and optionally induce a structural change in the polynucleotide when the polypeptide binds or becomes associated with the polynucleotide. By inducing a conformational change in the polynucleotide, the polypeptide packages the polynucleotide. It has been reported that TFAM binds to mitochondrial DNA in a ratio of 900:1 (Alam, T. I. et al. (2003) Nucleic Acid Res. 31(6):1640-1645). It will be appreciated that the amount of polynucleotide-binding polypeptide used in the compositions and methods disclosed herein can vary depending on the size and amount of the polynucleotide to be delivered. Suitable ratios of polynucleotide-binding polypeptide to base pairs of polynucleotide to be delivered include, but are not limited to, about 1:1 to 1:1,000; more preferably 1:100; even more preferably 1: about 10 to about 20 base pairs of polynucleotide to be delivered. It will also be appreciated that TFAM, another polynucleotide-binding polypeptide, or a combination of two or more polynucleotide-binding polypeptides can be added to a polynucleotide to wrap or cover the polynucleotide, and thereby package the polynucleotide and protected it from degradation.

[0063] TFAM can be modified to include a PTD and optionally a targeting signal. The targeting signal can include a sequence of monomers that facilitates the localization of the molecule to a specific tissue, cell, or organelle. The monomers can be amino acids, nucleotide or nucleoside bases, or sugar groups such as glucose, galactose, and the like which form carbohydrate targeting signals.

[0064] B. Protein Transduction Domain

[0065] The polynucleotide-binding polypeptide can be modified to include a protein transduction domain (PTD), also known as cell penetrating peptides (CPPS). PTDs are known in the art, and include but are not limited to small regions of proteins that are able to cross a cell membrane in a receptor-independent mechanism (Kabouridis, P. (2003) Trends in Biotechnology (11):498-503). Although several of PTDs have been documented, the two most commonly employed PTDs are derived from TAT (Frankel and Pabo, (1988) Cell, December 23; 55(6):1189-93) protein of HIV and Antennapedia transcription factor from Drosophila, whose PTD is known as Penetratin (Derossi et al., (1994) J Biol. Chem. 269(14):10444-50).

[0066] The Antennapedia homeodomain is 68 amino acid residues long and contains four alpha helices (SEQ. ID NO. 4). Penetratin is an active domain of this protein which consists of a 16 amino acid sequence derived from the third helix of Antennapedia. TAT protein (SEQ. ID NO: 5) consists of 86 amino acids and is involved in the replication of HIV-1. The TAT PTD consists of an 11 amino acid sequence domain (residues 47 to 57; YGRKKRRQRRR (SEQ. ID. NO. 1)) of the parent protein that appears to be critical for uptake. Additionally, the basic domain Tat(49-57) or RKKRRQRRR (SEQ. ID NO. 2) has been shown to be a PTD. In the current literature TAT has been favored for fusion to proteins of interest for cellular import. Several modifications to TAT, including substitutions of Glutatmine to Alanine, i.e., Q→A, have demonstrated an increase in cellular uptake anywhere from 90% (Wender et al. 2000) to up to 33 fold in mammalian cells. (Ho et al. (2001) Cancer Res. 61(2):474-7) The most efficient uptake of modified proteins was revealed by mutagenesis experiments of TAT-PTD, showing that an 11 arginine stretch was several orders of magnitude more efficient as an intercellular delivery vehicle. Thus, some embodiments include PTDs that are cationic or amphipathic. Additionally exemplary PTDs include but are not limited to poly-Arg-RRRRRRR (SEQ. ID. NO.: 6); PTD-5-RRQRRTSKLMKR (SEQ. ID. NO.: 7); Transportan GWTLNSAGYLLGKINLKALAALAKKIL (SEQ. ID. NO.: 8); KALA-WEAKLAKALAKALAKHLAKALAKALKCEA (SEQ. ID. NO.: 9); and RQIKIWFQNRRMKWKK (SEQ. ID. NO.: 207).

[0067] C. Targeting Signal or Domain

[0068] In still other embodiments, the modified polynucleotide-binding polypeptide is optionally modified to include a targeting signal or domain. The targeting signal or sequence can be specific for a tissue, organ, cell, organelle, non-nuclear organelle, or cellular compartment. For example, the compositions disclosed herein can be modified with galactosyl-terminating macromolecules to target the compositions to the liver or to liver cells. The modified compositions selectively enter hepatocytes after interaction of the carrier galactose residues with the asialoglycoprotein receptor present in large amounts and high affinity only on these cells. Moreover, the compositions disclosed here can be targeted to specific intracellular regions, compartments, or organelles.

[0069] Additional embodiments of the present disclosure are directed to specifically delivering polynucleotides to intracellular compartments or organelles, both nuclear and non-nuclear. The polynucleotides can encode a polypeptide or interfere with the expression of a different polynucleotide. Eukaryotic cells contain membrane bound structures or organelles. Organelles can have single or multiple membranes and exist in both plant and animal cells. Depending on the function of the organelle, the organelle can consist of specific components such as proteins and cofactors. The polynucleotides delivered to the organelle can encode polypeptides that can enhance or contribute to the functioning of the organelle. Some organelles, such as mitochondria and plastids, contain their own genome. Nucleic acids are replicated, transcribed, and translated within these organelles. Proteins are imported and metabolites are exported. Thus, there is an exchange of material across the membranes of organelles. In some embodiments, polynucleotides encoding plastid polypeptides are specifically delivered to plastids.

[0070] Exemplary organelles include the nucleus, mitochondrion, plastid, lysosome, peroxisome, Golgi, endoplasmic reticulum, and nucleolus. Synthetic organelles can be formed from lipids and can contain specific proteins within the lipid membranes. Additionally, the content of synthetic organelles can be manipulated to contain components for the translation of nucleic acids.

### 1. Nuclear Localization Signals

[0071] Compositions disclosed herein can include one or more nuclear localization signals. Most proteins transported across the nuclear envelope contain a nuclear localization signal (NLS). The NLS is recognized by a nuclear import complex, enabling active transport to the nucleus. Even the transport of small proteins that can diffuse through the nuclear pore is increased by an NLS. NLS domains are known in the art and include for example, SV 40 T antigen or a fragment thereof, such as PKKKRKV (SEQ. ID. NO.: 10). The NLS can be simple cationic sequences of about 4 to about 8 amino acids, or can be bipartite having two interdependent positively charged clusters separated by a mutation resistant linker region of about 10-12 amino acids. The cauliflower mosaic virus (CMV) major capsid protein, CP, possesses an amino-terminal NLS. Additional representative NLS include but are not limited to GKKRSKV (SEQ. ID. NO.: 11); KSRKRKL (SEQ. ID. NO.: 12); KRPAATKKAGQAKKKKLDK (SEQ. ID. NO.: 13); RKKRKTEEESPLKDKAKKSK (SEQ. ID. NO.: 14); KDCVMNKHHRNRCQYCRLQR (SEQ. ID. NO.: 15); PAAKRVKLD (SEQ. ID. NO.: 16); and KKYENVVIKRSPRKRGRPRK (SEQ. ID. NO.: 17).

[0072] Additionally, it is known in the art that animal and yeast NLS function in plants.

### 2. Mitochondria Targeting

[0073] In other embodiments of the present disclosure, modified polynucleotide-binding polypeptides are disclosed that specifically deliver polynucleotides to mitochondria. Mitochondria contain the molecular machinery for the conversion of energy from the breakdown of glucose into adenosine triphosphate (ATP). The energy stored in the high energy phosphate bonds of ATP is then available to power cellular functions. Mitochondria are mostly protein, but some lipid, DNA and RNA are present. These generally spherical organelles have an outer membrane surrounding an inner membrane that folds (cristae) into a scaffolding for oxidative phosphorylation and electron transport enzymes. Most mitochondria have flat shelf-like cristae, but those in steroid secreting cells may have tubular cristae. The mitochondrial matrix contains the enzymes of the citric acid cycle, fatty acid oxidation and mitochondrial nucleic acids.

[0074] Mitochondrial DNA is double stranded and circular. Mitochondrial RNA comes in the three standard varieties; ribosomal, messenger and transfer, but each is specific to the mitochondria. Some protein synthesis occurs in the mitochondria on mitochondrial ribosomes that are different than cytoplasmic ribosomes. Other mitochondrial proteins are made on cytoplasmic ribosomes with a signal peptide that directs them to the mitochondria. The metabolic activity of the cell is related to the number of cristae and the number of mitochondria within a cell. Cells with high metabolic activity have many well developed mitochondria. New mitochondria are formed from preexisting mitochondria when they grow and divide.

[0075] The inner membranes of mitochondria contain a family of proteins of related sequence and structure that transport various metabolites across the membrane. Their amino acid sequences have a tripartite structure, made up of three related sequences about 100 amino acids in length. The repeats of one carrier are related to those present in the others and several characteristic sequence features are conserved throughout the family.

[0076] Targeting specific polynucleotides to organelles can be accomplished by modifying the disclosed compositions to express specific organelle targeting signals. These sequences target specific organelles, but in some embodiments the interaction of the targeting signal with the organelle does not occur through a traditional receptor:ligand interaction. The eukaryotic cell comprises a number of discrete membrane bound compartments, or organelles. The structure and function of each organelle is largely determined by its unique complement of constituent polypeptides. However, the vast majority of these polypeptides begin their synthesis in the cytoplasm. Thus organelle biogenesis and upkeep require that newly synthesized proteins can be accurately targeted to their appropriate compartment. This is often accomplished by amino-terminal signaling sequences, as well as post-translational modifications and secondary structure. For plant mitochondria, several amino-terminal targeting signals have been deduced and are included, in part, in Table 1. Additionally, it is known in the art that animal and yeast mitochondrial targeting signals function in plants.

[0077] In one embodiment, the organelle targeting signal can contain at least two, preferably 5-15, most preferably about 11 charged groups, causing the targeting signal to be drawn to organelles having a net opposite charge. In another embodiment, the targeting signal can contain a series of charged groups that cause the targeting signal to be transported into an organelle either against or down an electromagnetic potential gradient. Suitable charged groups are groups that are charged under intracellular conditions such as amino acids with charged functional groups, amino groups, nucleic acids, and the like. Mitochondrial localization/targeting signals generally consist of a leader sequence of highly positively charged amino acids. This allows the protein to be targeted to the highly negatively charged mitochondria. Unlike receptor:ligand approaches that rely upon stochastic Brownian motion for the ligand to approach the receptor, the mitochondrial localization signal of some embodiments is drawn to mitochondria because of charge.

[0078] In order to enter the mitochondria, a protein generally must interact with the mitochondrial import machinery, consisting of the Tim and Tom complexes (Translocase of the Inner/Outer Mitochondrial Membrane). With regard to the mitochondrial targeting signal, the positive charge draws the linked protein to the complexes and continues to draw the protein into the mitochondria. The Tim and Tom complexes allow the proteins to cross the membranes. Accordingly, one embodiment of the present disclosure delivers compositions of the present disclosure to the inner mitochondrial space utilizing a positively charged targeting signal and the mitochondrial import machinery. In another embodiment, PTD-linked polypeptides containing a mitochondrial localization signal do not seem to utilize the TOM/TIM complex for entry into the mitochondrial matrix, see Del Gaizo et al. (2003) Mol Genet Metab. 80(1-2):170-80.

[0079] Given the importance of mitochondria for plant life, embodiments of the present disclosure also encompasses the manipulation of the mitochondrial genome to supply novel biosynthetic and environmental and chemical resistance routes. Furthermore, the ability to introduce exogenous genes may lead to plants with increased viability in otherwise hostile environments and increased efficiency of oxidative phosphorylation. Since plant mitochondria are involved in plant defense mechanisms, other embodiments include the modification of plant mitochondrial genomes to provide increased resistance or susceptibility to infectious pathogens. Furthermore, the expression of exogenous genes within the mitochondria is believed to circumvent crucial photosynthetic activities present in either the nucleus or plastid of the plant cell. Thus, other embodiments are directed to the transfection of mitochondria for more effective biosynthesis strategies for commercial compounds. In one embodiment, the polynucleotide encodes at least one protein with anti-microbial properties for expression in the plant. The protein may comprise an antibiotic. Additionally, a recombinant polynucleotide encoding at least one enzyme for converting hard-to-ferment sugars to more easily fermentable sugars for expression in the plant is utilized. In another embodiment, the polynucleotide encodes one or more enzymes capable of modulating the cellulose content of the transgenic plant. In one embodiment, the polynucleotide encodes for at least one protein promoting starch hydrolysis. In another embodiment, the polynucleotide encodes for proteins causing the plant to absorb environmental pollutants such as a metalloid such as arsenic or selenium, a heavy metal such as lead, chromium, cadmium, zinc, copper, or uramium, or a persistent organic pollutant such as DDT or PCBs.

### 3. Plastid Targeting

[0080] In another embodiment, modified compositions disclosed herein specifically deliver polynucleotides to plastids by including a plastid localization signal or domain. For plastids, several amino-terminal targeting signals have been deduced and are included, in part, in Table 2. The plastid is the genus of plant organelles of which a chloroplast is a specific species. A chloroplast is a photosynthetic organelle in eukaryotes with a double surrounding membrane. The fluid inside the double-membrane is called the stroma. The chloroplast has a nucleoid region to house its circular, naked DNA. The stroma is also the site of the Calvin Cycle. The Calvin Cycle is the series of enzyme-catalyzed chemical reactions that produce carbohydrates and other compounds from carbon dioxide.

[0081] Within the stroma are tiny membrane sacs called thylakoids. The sacs are stacked in groups. Each group is called a granum. There are many grana in each chloroplast. The thylakoid membranes are the site of photosynthetic light reactions. The thylakoids have intrinsic and extrinsic proteins, some with special prosthetic groups, allowing for electrons to be moved from protein complex to protein complex. These proteins constitute an electron transport system sometimes known as the Z-scheme.

[0082] The prosthetic group for two critical membrane proteins (P680 and P700) is a chlorophyll a pigment molecule. These chlorophyll-binding proteins give the thylakoids an intense green color. The many thylakoids in a chloroplast give the chloroplast a green color. The many chloroplasts in a leaf mesophyll cell give that cell a green color. The many mesophyll cells in a leaf give the leaf a green color. The chlorophyll molecule absorbs light energy and an electron is boosted within the electron cloud in a resonating chemical structure surrounding a magnesium ion. This excited electron is removed by the surrounding electron transport proteins in the membrane. The movement of these electrons, and accompanying protons, results ultimately in the trapping of energy in a phosphate bond in ATP. The thylakoid is thus the location for light absorption and ATP synthesis. The stroma uses the ATP to store the trapped energy in carbon-carbon bonds of carbohydrates. Some chloroplasts show developing starch grains. These represent complex polymers of carbohydrates for long-term storage.

[0083] Given the bioenergetic functions of plastids, the ability to introduce exogenous genes may lead to plants with increased viability in otherwise hostile environments and increased efficiency of photosynthesis. Furthermore, the expression of exogenous genes within the chloroplasts is believed to be significantly more efficient in chloroplasts relative the expression of exogenous genes introduced into the nucleus of the cell. Thus, other embodiments are directed to the transfection of chloroplasts for more effective biosynthesis strategies for commercial compounds. In one embodiment, the polynucleotide encodes at least one protein with anti-microbial properties for expression in the plant. The protein may comprise an antibiotic. Additionally, a recombinant polynucleotide encoding at least one enzyme for converting hard-to-ferment sugars to more easily fermentable sugars for expression in the plant is utilized. In another embodiment, the polynucleotide encodes one or more enzymes capable of modulating the cellulose content of the transgenic plant. In one embodiment, the polynucleotide encodes for at least one protein promoting starch hydrolysis. In another embodiment, the polynucleotide encodes for proteins causing the plant to absorb environmental pollutants such as a metalloid such as arsenic or selenium, a heavy metal such as lead, chromium, cadmium, zinc, copper, or uramium, or a persistent organic pollutant such as DDT or PCBs.

### 4. Modified Polynucleotide-Binding Polypeptide:Polynucleotide Complexes

[0084] Modified polynucleotide-binding polypeptides having a protein transduction domain, and optionally, a targeting signal can be combined with a polynucleotide of interest to form a polypeptide-polynucleotide complex. For example, the modified polypeptide can reversibly bind the polynucleotide of interest. The binding or interaction between the modified polypeptide and the polynucleotide of interest is strong enough to protect the polynucleotide from degradation but reversible so that the polynucleotide maintains its biological activity once it has been delivered to the cell or organelle. The biological activity of the polynucleotide can include expressing the polypeptide encoded by the polynucleotide or the enzymatic activity of the polynucleotide if it is a ribozyme or DNAzyme.

[0085] In certain embodiments, one or more of the disclosed polynucleotide binding proteins can be combined with a polynucleotide of interest to package the polynucleotide for delivery into a cell. In particular, large polynucleotides having for example at least 10 kb, typically at least 16 kb to about 20 kb, or at least 30 kb can be packaged using the disclosed polypeptides. The polynucleotide binding protein can be added to a polynucleotide in amounts sufficient to package or condense the polynucleotide for delivery to a cell or host. The polypeptide can be added to the polynucleotide in a ratio of about 1 polypeptide to about 10 to about 100 nucleotides.

[0086] Another embodiment provides a method for transfecting a plant organelle by combining a polynucleotide-binding polypeptide, for example TFAM, with a polynucleotide to be delivered and an amount of a lipid and/or polyamine to form a complex and contacting a cell, for example a plant cell, with the complex. The polynucleotide-binding protein optionally includes a PTD and optionally a targeting signal. The lipid and/or polyamine can be branched or unbranched, saturated or unsaturated, and typically has a carbon chain length of about 6 to about 50 carbons, more typically about 10 to about 30 carbons, even more typically about 15 to about 20 carbons. A nuclease can also be delivered to the non-nuclear organelle. The nuclease can be selected so that it cleaves endogenous nucleic acids, but does not cleave the heterologous nucleic acids that are introduced into the non-nuclear organelle. This embodiment allows for the creation of homoplasmic plastid and mitochondrial plants. Alternatively, a transfected non-nuclear organelle, for example a mitochondrion or plastid, can have a nuclease delivered to it wherein the nuclease is selected so that it cleaves the transfected nucleic acids or the heterologous nucleic acids in the non-nuclear organelle sufficient to replace the endogenous nucleic acids.

[0087] In one embodiment, the polynucleotide of interest is operably linked to a promoter or other regulatory elements known in the art. Thus, the polynucleotide can be a vector such as an expression vector. The engineering of polynucleotides for expression in a prokaryotic or eukaryotic system may be performed by techniques generally known to those of skill in recombinant expression. It is believed that virtually any expression system may be employed in the expression of the disclosed nucleic and amino sequences.

[0088] An expression vector typically comprises one of the disclosed compositions under the control of one or more promoters. To bring a coding sequence “under the control of” a promoter, one positions the 5′ end of the translational initiation site of the reading frame generally between about 1 and 50 nucleotides “downstream” of (i.e., 3′ of) the chosen promoter. The “upstream” promoter stimulates transcription of the inserted DNA and promotes expression of the encoded recombinant protein. This is the meaning of “recombinant expression” in the context used here.

[0089] Many standard techniques are available to construct expression vectors containing the appropriate nucleic acids and transcriptional/translational control sequences in order to achieve protein or peptide expression in a variety of host-expression systems. Cell types available for expression include, but are not limited to, bacteria, such as E. Coli and B. subtilis transformed with recombinant phage DNA, plasmid DNA or cosmid DNA expression vectors. It will be appreciated that any of these vectors may be packaged and delivered using one or more of the disclosed polynucleotide packaging polypeptides.

[0090] Expression vectors for use in plant cells ordinarily include an origin of replication (as necessary), a promoter located in front of the gene(s) to be expressed, along with any necessary ribosome binding sites, RNA splice sites, polyadenylation site, and transcriptional terminator sequences. The origin of replication may be provided either by construction of the vector to include an exogenous origin, such as may be derived from Cauliflower mosaic virus or other viral (e.g., Tobacco mosaic virus) source, or may be provided by the host cell chromosomal replication mechanism. If the vector is integrated into the host cell chromosome, the latter is often sufficient.

[0091] The promoters may be derived from the genome of plant cells (e.g., nuclear factor Y promoter) or from plant viruses (e.g., the CMV 35S promoter). Further, it is also possible, and may be desirable, to utilize promoter or control sequences normally associated with the desired gene sequence, provided such control sequences are compatible with the host cell systems.

[0092] A number of viral based expression systems may be utilized, for example, commonly used promoters are derived from CMV. The CMV 35S promoter is useful because it is robust in plant transformation and shows no tissue-specificity. Smaller or modified CMV 35S fragments may also be used, provided there is included the approximately 46 bp sequence extending from upstream of transcription initiation.

[0093] Specific initiation signals may also be required for efficient translation of the disclosed compositions. These signals include the ATG initiation codon and adjacent sequences. Exogenous translational control signals, including the ATG initiation codon, may additionally need to be provided. One of ordinary skill in the art would readily be capable of determining this need and providing the necessary signals. It is well known that the initiation codon must be in-frame (or in-phase) with the reading frame of the desired coding sequence to ensure translation of the entire insert. These exogenous translational control signals and initiation codons can be of a variety of origins, both natural and synthetic. The efficiency of expression may be enhanced by the inclusion of appropriate transcription enhancer elements or transcription terminators.

[0094] In eukaryotic expression, one will also typically desire to incorporate into the transcriptional unit an appropriate polyadenylation site if one was not contained within the original cloned segment. Typically, the poly A addition site is placed about 30 to 2000 nucleotides “downstream” of the termination site of the protein at a position prior to transcription termination.

[0095] For long-term, high-yield production of recombinant proteins, stable expression is preferred. For example, cell lines that stably express constructs encoding proteins may be engineered. Rather than using expression vectors that contain viral origins of replication, host cells can be transformed with vectors controlled by appropriate expression control elements (e.g., promoter, enhancer, sequences, transcription terminators, polyadenylation sites, etc.), and a selectable marker. Following the introduction of foreign DNA, engineered cells may be allowed to grow for 1-2 days in an enriched medium, and then are switched to a selective medium. The selectable marker in the recombinant plasmid confers resistance to the selection and allows cells to stably integrate the plasmid into their chromosomes and grow to form foci, which in turn can be cloned and expanded into cell lines.

[0096] One embodiment provides a modified TFAM polypeptide having at least one PTD, and optionally, at least one targeting signal, for example, a mitochondrial localization signal or plastid localization signal. The modified TFAM can be associated with a polynucleotide of interest. The association can be accomplished in vitro or in vivo. TFAM can be mixed in amounts sufficient to wrap or bind the polynucleotide of interest. Typically, one molecule of TFAM wraps about 15 base pairs of a target polynucleotide. Enough modified TFAM can be added to a polynucleotide of interest to completely coat the exterior of the polynucleotide and/or to condense the polynucleotide. The polynucleotide is packaged so that the PTD and the optional targeting signal are displayed on the surface of the packaged polynucleotide. It will be appreciated that more than one polynucleotide can be packaged into a single complex using more than one modified polynucleotide-binding or packaging polypeptides.

[0097] The polynucleotide generally encodes a functional polypeptide, an antisense polynucleotide, an inhibitory RNA, or an entire operon and is packaged with the modified polynucleotide-binding polypeptide. At least one cell is contacted with the resulting complex either in vitro or in vivo. The protein transduction domain facilitates crossing the cell's outer membrane and delivers the polynucleotide to the interior of the cell. Once in the cytoplasm, an optional targeting signal or domain facilitates the localization of the polynucleotide of interest to a region of interest, for example to the mitochondrion or plastid. Once the polynucleotide of interest is delivered to its destination, it can be transcribed and ultimately translated. Alternatively, if the polynucleotide of interest is an antisense polynucleotide or enzymatic polynucleotide, the polynucleotide of interest can act at or near the deliver site, for example in the cytosol or in an organelle.

[0098] It has been reported that a major limitation of plant transformation technologies is the inability to introduce multiple genes in a single transformation. Many plastid genes are grouped in operons. Multicistronic mRNAs transcribed from these operons can be processed to produce mRNAs for single proteins. Introducing blocks of foreign genes in a single operon would avoid the complications inherent in putting one gene at a time into random locations. In one embodiment, a method of transfecting a host plastid with an operon possessing multiple genes is provided.

[0099] Another exemplary embodiment provides a method for transfecting a host, a host's cell, or a host's cellular organelle, for example the nucleus, mitochondria, or plastid, including the steps of contacting a host's cell with a complex including a modified polynucleotide-binding polypeptide having at least one PTD, and optionally, at least one targeting signal, in combination with a polynucleotide of interest. In one embodiment, the polynucleotide-polypeptide complex acts as a non-viral vector. Cells from one host can be transfected and administered to a second host, or a host's cells can be transfected and administered to the host. The transfection can occur in vivo or in vitro.

[0100] Suitable cells for transfection include cells capable of being transfected, for example eukaryotic or prokaryotic cells. The cells can be somatic, quiescent, embryonic, mitotic, stem cells, progenitor cells, germ line cells, pluripotent cells, totipotent cells, embryonic stem cells, heterologous cells, undifferentiated, partially differentiated, endoderm, mesoderm, ectoderm, immortalized, primary or cell wall denuded (proto) cultures. Organelle targeting signals of the present disclosure include polypeptides having a net positive charge, an NLS, and those listed in Tables 1 and 2. Suitable PTDs include but are not limited to HIV TAT YGRKKRRQRRR (SEQ. ID NO. 1) or RKKRRQRRR (SEQ. ID NO. 2); 11 Arginine residues, or positively charged polypeptides or polynucleotides having 8-15 residues, preferably 9-11 residues. The term non-nuclear organelle is intended to encompass all organelles other than the nucleus. It will be appreciated the disclosed compositions include a targeting signal, for example an organelle targeting signal, which causes the complex to associate with the organelle, typically to an organelle having a net negative charge or a region having a negative charge. In one embodiment, the association of the targeting signal with the organelle does not occur through a receptor:ligand interaction. The association of the organelle and complex can be ionic, non-covalent, covalent, reversible or irreversible. Exemplary complex:organelle associations include but are not limited to protein-protein, protein-carbohydrate, protein-nucleic acid, nucleic acid-nucleic acid, protein-lipid, lipid-carbohydrate, antibody-antigen, or avidin-biotin. The organelle targeting signal of the complex can be a protein, peptide, antibody, antibody fragment, lipid, carbohydrate, biotin, avidin, steptavidin, chemical group, or other ligand that causes specific association between the organelle and complex, preferably an electromagnetic association as between oppositely charged moieties.

[0101] The specific interaction between the introduced complex and its target, for example a specific type of cell or an organelle, can be accomplished by at least two methods. In one exemplary method a recombinant non-viral complex can include a recombinant polypeptide that expresses a targeting signal that interacts with the targeted the organelle. Preferably, the complex expresses a outer polypeptide that is specific to the target organelle. In another method the complex is modified to incorporate an exogenous targeting protein to which an organelle binds. Alternatively, a complex can include a modified recombinant polypeptide that specifically interacts with a desired cell, tissue, organ, or organelle, for example by expressing a amino acid sequence that interacts with the specific cell or organelle. It will be appreciated by those of skill in the art that the complex can be chemically modified to have a net positive or negative charge depending on the modification agent. For example, the complex can be coated with polylysine or other agents containing a primary amino group. Additionally, amino groups can be linked to the complex or compound containing amino groups can be linked to the complex. The linkage can be reversible or irreversible, covalent or non-covalent. Other charged groups for conferring a charge to a compound are known in the art and can be incorporated into the complex.

[0102] Nucleic acids including but not limited to polynucleotides, anti-sense nucleic acids, peptide nucleic acids, natural or synthetic nucleic acids, nucleic acids with chemically modified bases, RNA, DNA, RNA-DNA hybrids, enzymatic nucleic acids such as ribozymes and DNAzymes, native/endogenous genes and non-native/exogenous genes and fragments or combinations thereof can be introduced into a cell or organelle of a host cell, in particular cells or organelles that can transcribe and or translate nucleic acids into proteins such as the nucleus, mitochondria and chloroplasts. In one embodiment of the present disclosure, all or part of the mitochondrial or plasitd genome can be introduced into an organelle. The nucleic acids can be introduced into the organelle with the complex when the complex crosses the organelle membrane via protein transduction domains.

[0103] Another embodiment provides a method for transfecting cellular organelles, for example eukaryotic organelles, by contacting the cell with a complex including a polynucleotide-binding polypeptide in combination with a polynucleotide, wherein the polynucleotide-binding polypeptide includes a PTD and optionally, a targeting signal or domain. The targeting signal can be a polypeptide, modified or unmodified, displayed on the surface of the complex which enables the complex to specifically associate with the target cell or organelle. Exemplary targeting signals include, plastid localization signals, mitochondrial targeting signals including the targeting signals listed in TABLE 1 and 2 and other signals having a net positive charge. Contacting a cell with the complex in a manner that introduces the complex or the polynucleotide into the cytosol of said cell. The complex can further associates with its specific target organelle or intracellular region of the cell and the polynucleotide can be introduced into the organelle. Introduction of the polynucleotide into the organelle can be accomplished by transducing the polynucleotide across organelle membranes via a protein transduction domain expressed on a surface of the complex.

[0104] Introduction of a polynucleotide into the cytosol of a eukaryotic cell, in an intact functional form, can be accomplished using standard techniques known to those skilled in the art or through modification of the recombinant polynucleotide-binding polypeptide with a protein transduction domains. Such transfection procedures include but are not limited to microinjection, electroporation, calcium chloride premeablization, polyethylene glycol permeabilization, protoplast fusion or cationic lipid premeablization. In one embodiment a polynucleotide-binding polypeptide is modified to include a Protein Transduction Domain that enables the polypeptide bound to a polynucleotide to be transduced across a lipid bilayer including a cellular membrane, organelle membrane, or plasma membrane. Suitable PTDs include but are not limited to an 11 Arginine PTD or Tat-PTD (SEQ. ID NOs. 3 or 4) and poly-Arg-RRRRRRR (SEQ. ID. NO.: 6); PTD-5-RRQRRTSKLMKR (SEQ. ID. NO.: 7); Transportan GWTLNSAGYLLGKINLKALAALAKKIL (SEQ. ID. NO.: 8); and KALA-WEAKLAKALAKALAKHLAKALAKALKCEA (SEQ. ID. NO.: 9).

[0105] In accordance with one embodiment a method is provided for introducing exogenous nucleic acid sequences into a mitochondrion of a plant cell. Any mitochondrial transfection technique should ensure that a nucleic acid crosses three membranes (the plasma membrane and the outer and inner mitochondrial membranes), addresses the high copy of mtDNA molecules, and utilizes a minimal, circular mitochondrial replicon. In one embodiment of the present disclosure a recombinant polynucleotide-binding polypeptide is used as a delivery vehicle for introducing nucleic acid sequences into an organelle, for example the mitochondrion. The recombinant polypeptide packages the polynucleotides to prevent them from being degraded, and to condense the polynucleotides for delivery. Condensation of polynucleotides includes the ordered structure of polynucleotides under concentrated conditions.

[0106] In accordance with another embodiment a recombinant polynucleotide-binding polypeptide having a PTD and a mitochondrial targeting signal is used for mitochondrial transfection. This approach allows for direct manipulation of mtDNA and introduction of the circular genome at high-copy number. In one embodiment this method is used to manipulate or replace plant mtDNA. In another embodiment the introduced nucleic acid will be incorporated (recombined) with the existing endogenous mtDNA sequences resulting in the manipulation of the mtDNA sequences. Either method can be used to restore full functionality to damaged mitochondria.

[0107] Another embodiment provides a method for modifying the genome of a non-nuclear organelle, for example a plant mitochondrion or plastid, comprising transfecting the non-nuclear organelle with a polynucleotide encoding an enzyme that specifically cleaves the non-nuclear organelle's genome but does not cleave the polynucleotide. An exemplary enzyme includes, but is not limited to, a nuclease such as NotI. It will be appreciated that any enzyme can be used that selectively cleaves nucleic acids endogenous to the non-nuclear organelle without cleaving heterologous nucleic acids. Heterologous nucleic acids refer to nucleic acids introduced from another organism or from a source other than the mitochondrion or host organism of the mitochondrion. The polynucleotide encoding the enzyme can be delivered alone or in combination with second polynucleotide using the methods described herein. The second polynucleotide can encode a second polypeptide, for example, that functions inside or outside of the non-nuclear organelle. The second polypeptide can function in the nucleus and can be a transcription factor, an enhancer or a suppressor of gene activation or transcription, a subunit of a transcription factor, a DNA binding polypeptide or the like. The second polypeptide can act specifically or non-specifically on one or more specific genes or nucleic acid sequences. The second polypeptide expressed in the non-nuclear organelle can be delivered outside of the non-nuclear organelle. The second polypeptide can comprise at least one PTD and optionally a targeting signal to facilitate translocation of the second polypeptide to a desired intracellular or extracellular location, for example the nucleus, cytoplasm, plasma membrane, etc. It will be appreciated that the second polypeptide can encode a secreted polypeptide, an intracellular polypeptide, a transmembrane polypeptide, or a polypeptide that is at least partially displayed on the exterior surface of a cell membrane. Secreted polypeptides include, but are not limited to, growth factors, cytokines, chemokines, neurotransmitters, insulin, or combinations thereof. Secreted polypeptides can subsequently mature to adopt proper post-translational modifications for proper function. In one embodiment, the secreted polypeptide is a therapeutic molecule produced in plants, for example an antibody.

[0108] Alternatively, the polynucleotide encoding the enzyme can be packaged by a polynucleotide-binding polypeptide and combined with a lipid and/or polyamine vector for delivery to the non-nuclear organelle. An exemplary lipid and/or polyamine vector includes, but is not limited to, LIPOFECTAMINE™. The lipid and/or polyamine vector can be modified to display a targeting signal on the exterior to assist in the delivery of the polynucleotide to the non-nuclear organelle.

[0109] In some embodiments, the polynucleotide encoding the enzymatic polynucleotide also encodes at least a second polypeptide, for example, a polypeptide that compensates for a mutation in the non-nuclear organelle's genome. The second polypeptide can compensate for a null mutation, deletion, inversion, substitution, or transposition in the non-nuclear organelle's genome. Alternatively, the second polypeptide encodes a functional polypeptide that can be delivered to a location outside of the non-nuclear organelle, for example, the nucleus.

[0110] Still another embodiment provides a method form modifying a genome of a non-nuclear organelle comprising transfecting the non-nuclear organelle with a polynucleotide encoding an enzyme that specifically cleaves heterologous nucleic acids but does not cleave the polynucleotide encoding the enzyme or the endogenous nucleic acids of the non-nuclear organelle.

[0111] Still another embodiment provides a method for modifying a genome of a non-nuclear organelle comprising contacting a cell with enzymatic polypeptide comprising a PTD and a targeting signal operably linked to the enzymatic polypeptide. The enzymatic polypeptide can be a nuclease or restriction enzyme specific for a restriction site found in the genome of the non-nuclear organelle. Alternatively, the enzymatic polypeptide can cleave nucleic acids at a site found in heterologous nucleic acids and not in nucleic acids endogenous to the non-nuclear organelle. The enzymatic polypeptide can be delivered alone or in combination with a polynucleotide.

[0112] Suitable mitochondria localization sequences are known to those skilled in the art (see Table 1) and include the mitochondrial localization signal of subunit VIII of human cytochrome oxidase, the yeast cytochrome c oxidase subunit IV presequence and the amino-terminal leader peptide of the rat ornithine-transcarbamylase. In one embodiment the introduced sequences are expressed on the viral capsid head.

[0113] In another embodiment, the plastid genome of C3 plant species is modified to reduce oxygen producing capability and increase C02 fixation ability. This allows low-oxygen conditions necessary for Rubisco to refix CO2 as in C4 plants. Thus carbon dioxide fixation efficiency is increased in C3 plant species.

[0114] In one embodiment, plastid and/or mitochondrial genes are modified to introduce the capacity for nitrogen fixation. Nitrogen fixation requires large amounts of energy in the form of ATP and plastids and mitochondria make this as a product of photosynthetic or oxidative energy transduction. For example, the biosynthetic pathway responsible for nitrogen fixation in rhizobia is engineered into the organellar genome to provide the capability to fix atmospheric N2 into organic nitrogen. Since the enzyme nitrogenase is sensitive to O2, an embodiment is provided such that either an oxygen depleting enzyme is introduced, or oxygen production is inhibited. In one embodiment, the polynucleotide encodes at least one protein with anti-microbial properties for expression in the plant. The protein may comprise an antibiotic. Additionally, a recombinant polynucleotide encoding at least one enzyme for converting hard-to-ferment sugars to more easily fermentable sugars for expression in the plant is utilized. In another embodiment, the polynucleotide encodes one or more enzymes capable of modulating the cellulose content of the transgenic plant. In one embodiment, the polynucleotide encodes for at least one protein promoting starch hydrolysis. In another embodiment, the polynucleotide encodes for proteins causing the plant to absorb environmental pollutants such as a metalloid such as arsenic or selenium, a heavy metal such as lead, chromium, cadmium, zinc, copper, or uranium, or a persistent organic pollutant such as DDT or PCBs.

[0115] Plastid localization signals are known to those skilled in the art, and any of those signals can be used to target the complex to the target organelle, Localization sequences suitable for use in the present disclosure are described in Emanuelson et al., Predicting Subcellular Localization of Proteins Based on Their N-terminal Amino Acid Sequence. Journal of Molecular Biology. 300(4):1005-16, 2000 Jul. 21, and in Cline and Henry, Import and Routing of Nucleus-encoded Chloroplast Proteins. Annual Review of Cell & Developmental Biology. 12:1-26, 1996, the disclosures of which are incorporated herein by reference in their entirety. More particularly, a list of mitochondria localization signals for targeting linked proteins or nucleic acids to the mitochondria is listed in TABLE 1. A list of chloroplast localization signals for targeting linked proteins or nucleic acids to the chloroplasts is listed in TABLE 2. In one embodiment the mitochondria or chloroplast localization signal is operably linked to a virus surface protein. It will be appreciated that part or all of the sequences listed in Tables 1 and 2 can be used as organelle targeting signals.

TABLE 1
Localization Signals for Targeting to the Mitochondria.
(verified using Mitochondrial Project MITOP Database --
http://mips.gsf.de/proj/medgen/mitop/)

| MITOP | SEQ. | | |
|---|---|---|---|
| Designation | ID. | Gene | |
| (Accession No.) | NO. | Name | Gene Name Full |
| 106092 | 18 | Etfa | electron transfer flavoprotein alpha |
| (NP633590) | | | chain precursor - mouse |
| 106098 | 19 | Etfb | electron transfer flavoprotein beta |
| (Q9DCW4) | | | chain - mouse |
| 107450 | 20 | Dld | dihydrolipoamide dehydrogenase |
| (NP000099) | | | precursor - human |
| 87979 | 21 | Ak3 | nucleoside-triphosphate--adenylate |
| (NP067274) | | | kinase 3 - mouse |
| 88529 | 22 | Cs | citrate synthase, mitochondrial |
| (NP080720) | | | |
| 891996 | 23 | Cps1 | carbamoyl-phosphate synthetase 1 |
| (AA031763) | | | |
| 97045 | 24 | Mod2 | malic enzyme complex, |
| (NP032641) | | | mitochondrial - mouse |
| 97499 | 25 | Pcca | propionyl-CoA carboxylase alpha |
| (AAH49802) | | | chain precursor - mouse |
| A27883 | 26 | PCCA | propionyl-CoA carboxylase alpha |
| (NP000273) | | | chain precursor |
| A28053 | 27 | Cbr2 | carbonyl reductase (NADPH) - mouse |
| NP031647) | | | |
| A29881 | 28 | mpp-2 | Mitochondrial processing peptidase |
| (XP331748) | | | beta subunit precursor (beta-mpp) |
| | | | (ubiquinol-cytochrome c reductase |
| | | | complexcore protein I) |
| A30605 | 29 | ACADS | acyl-CoA dehydrogenase precursor, |
| (NP000008) | | | short-chain-specific |
| A31998 | 30 | ETFA | electron transfer flavoprotein alpha |
| (WP000117) | | | chain precursor |
| A32422 | 31 | DBT | dihydrolipoamide S-(2-methyl- |
| | | | propanoyl)transferase precursor |
| A32800 | 32 | HSPD1 | heat shock protein 60 precursor |
| (NP002147) | | | |
| A36442 | 33 | mpp-1 | Mitochondrial processing peptidase |
| (XP326125) | | | alpha chain precursor |
| A37033 | 34 | IVD | isovaleryl-CoA dehydrogenase |
| (NP002216) | | | precursor |
| A37157 | 35 | BCKD | 3-methyl-2-oxobutanoate |
| (NP898871) | | | dehydrogenase (lipoamide) E1-beta |
| | | | chain precursor |
| A38234 | 36 | OGDH | oxoglutarate dehydrogenase |
| | | | (lipoamide) precursor |
| A39503 | 37 | ME2 | malate dehydrogenase (NAD+) |
| (NP002387) | | | precursor, mitochondrial |
| A40487 | 38 | FDXR | ferredoxin--NADP+ reductase, long |
| (NP004101) | | | form, precursor |
| A40559 | 39 | ACADL | long-chain-acyl-CoA dehydrogenase |
| (NP001599) | | | (LCAD) |
| A40872 | 40 | ALDH5 | aldehyde dehydrogenase (NAD+) 5 |
| | | | precursor, mitochondrial |
| A41581 | 41 | CYP3 | peptidylprolyl isomerase 3 precursor |
| (NP005720) | | | |
| A42224 | 42 | arg-2 | Carbamoyl-phosphate synthase, |
| (P22572) | | | arginine-specific, small chain |
| | | | precursor (arginine-specific |
| | | | carbamoyl-phosphate synthetase, |
| | | | glutamine chain) (cps-a) |
| A42845 | 43 | BDH | D-beta-hydroxybutyrate dehydro- |
| | | | genase precursor (3-hydroxybutyrate |
| | | | dehydrogenase) (fragment) |
| A45470 | 44 | HMGC | hydroxymethylglutaryl-CoA lyase |
| (AAP88794) | | | |
| A47255 | 45 | Pcx | pyruvate carboxylase |
| (AAH55030) | | | |
| A53020 | 46 | PCCB | propionyl-CoA carboxylase beta chain |
| (AAH53661) | | | precursor |
| A53719 | 47 | GLUDP | glutamate dehydrogenase (NAD(P)+) |
| (NP036216) | | | 2 precursor |
| A55075 | 48 | HspE1 | chaperonin-10 |
| (NP032329) | | | |
| A55680 | 49 | ACADS | short/branched chain acyl-CoA |
| (NP001600) | | | dehydrogenase precursor |
| A55723 | 50 | DCI | dodecenoyl-CoA Delta-isomerase |
| (P42126) | | | precursor, mitochondrial |
| A55724 | 51 | Acadm | Acyl-CoA dehydrogenase, medium- |
| (NP031408) | | | chain specific precursor (MCAD) |
| AA227572 | 52 | WARS2 | tryptophanyl-tRNA synthetase 2 |
| (NM201263) | | | (mitochondrial) - human |
| AB029948 | 53 | SerRS | mitochondrial seryl-tRNA synthetase |
| (NP060297) | | | (cDNA FLJ20450 FIS, CLONE |
| | | | KAT05607) - human |
| ACDL_MOUSE | 54 | Acadl | Acyl-CoA dehydrogenase, long-chain |
| (AAH27412) | | | specific precursor (LCAD) |
| AF047042 | 55 | CS | citrate synthase, mitochondrial |
| (AAC25560) | | | |
| AF097441 | 56 | FARS1 | phenylalanine-tRNA synthetase |
| (NP006558) | | | (FARS1) mRNA, nuclear gene |
| | | | encoding mitochondrial protein - |
| | | | human |
| ATPO_HUMAN | 57 | ATP5O | ATP synthase oligomycin sensitivity |
| (NP001688) | | | conferral protein precursor, |
| | | | mitochondrial |
| AXHU | 58 | FDX1 | adrenodoxin precursor |
| (AAP35327) | | | |
| CCHU | 59 | HCS | cytochrome c |
| (NP061820) | | | |
| CCNC | 60 | cyc-1 | Cytochrome c |
| (CAA29050) | | | |
| CE06620 | 61 | — | Probable leucyl-tRNA synthetase, |
| (NP056155) | | | mitochondrial |
| CE09597 | 62 | — | Pyruvate dehydrogenase (E2) |
| (AAG31658) | | | dihydrolipoamide acetyltransferase |
| CH10_MOUSE | 63 | Hspe1 | 10 KD heat shock protein, |
| (NP032329) | | | mitochondrial (hsp10) (10K |
| | | | chaperonin) mouse |
| CH60_CAEEL | 64 | hsp60 | Chaperonin homolog hsp60 precursor |
| (NP497429) | | | (heat shock protein 60) (hsp-60) |
| DEHUE2 | 65 | ALDH2 | aldehyde dehydrogenase (NAD+) 2 |
| (NP000681) | | | precursor, mitochondrial |
| DEHUE | 66 | GLUD1 | glutamate dehydrogenase (NAD(P)+) |
| (NP005262) | | | precursor |
| DEHULP | 67 | DLD | dihydrolipoamide dehydrogenase |
| (NP000099) | | | precursor |
| DEHUPA | 68 | PDHA1 | pyruvate dehydrogenase (lipoamide) |
| (NP000275) | | | alpha chain precursor |
| DEHUPB | 69 | PDHB | pyruvate dehydrogenase (lipoamide) |
| (AAH00439) | | | beta chain precursor |
| DEHUPT | 70 | PDHA2 | pyruvate dehydrogenase (lipoamide) |
| (NP005381) | | | alpha chain precursor, testis- |
| | | | specific (E1) |
| DEHUXA | 71 | BCKDH | 3-methyl-2-oxobutanoate |
| (NP000700) | | | dehydrogenase (lipoamide) alpha |
| | | | chain precursor |
| DEMSMM | 72 | Mor1 | malate dehydrogenase precursor, |
| (P08249) | | | mitochondrial |
| DSHUN | 73 | SOD2 | superoxide dismutase (Mn) precursor |
| ECHM_HUMAN | 74 | ECHS1 | enoyl-CoA hydratase, mitochondrial |
| (NP004083) | | | (short chain enoyl-CoA hydratase |
| | | | (SCEH)) |
| GABT_HUMAN | 75 | ABAT | 4-aminobutyrate aminotransferase, |
| (JC4022) | | | mitochondrial precursor (gamma- |
| | | | amino-N-butyrate-transaminase) |
| | | | (GABA transaminase) |
| GCDH_HUMAN | 76 | GCDH | glutaryl-CoA dehydrogenase |
| (AAP35352) | | | precursor (GCD) - human |
| GCDH_MOUSE | 77 | Gcdh | Glutaryl-CoA dehydrogenase |
| (NP032123) | | | precursor (GCD) - mouse |
| HCD1_CAEEL | 78 | — | Probable 3-hydroxyacyl-CoA |
| (NP499075) | | | dehydrogenase F54C8.1 |
| HCD2_CAEEL | 79 | — | Probable 3-hydroxyacyl-CoA |
| (NP509584) | | | dehydrogenase B0272.3 |
| HHMS60 | 80 | Hsp60 | heat shock protein 60 precursor |
| (NP034607) | | | |
| HMGL_MOUSE | 81 | Hmgcl | hydroxymethylglutaryl-CoA lyase |
| (AAB27965) | | | precursor (HG-CoA lyase) (HL) |
| | | | (3-hydroxy-3-methylglutarate-CoA |
| | | | lyase) |
| I48884 | 82 | — | 2-oxoglutarate dehydrogenase E1 |
| (AAC52130) | | | component (fragment) |
| I48966 | 83 | Aldh2 | aldehyde dehydrogenase (NAD+) 2 |
| (AAH05476) | | | precursor, mitochondrial |
| I49605 | 84 | Acads | Acyl-CoA dehydrogenase, short-chain |
| | | | specific precursor (SCAD) (butyryl- |
| | | | CoA dehydrogenase) |
| I52240 | 85 | ACAD | acyl-CoA dehydrogenase precurser, |
| (NP000007) | | | medium-chain-specific |
| I55465 | 86 | PDK1 | pyruvate dehydrogenase kinase |
| (AAH39158) | | | isoform 1 - human |
| I57023 | 87 | Sod2 | superoxide dismutase (Mn) precursor |
| (DSHUN) | | | |
| I70159 | 88 | PDK2 | pyruvate dehydrogenase kinase |
| (AAC42010) | | | isoform 2 - human |
| I70160 | 89 | PDK3 | pyruvate dehydrogenase kinase |
| (NP005382) | | | isoform 3 - human |
| JC2108 | 90 | HADH | long-chain-fatty-acid beta-oxidation |
| (AAA56664) | | | multienzyme complex alpha chain |
| | | | precursor, mitochondrial |
| JC2109 | 91 | HADH | long-chain-fatty-acid beta-oxidation |
| (NP000174) | | | multienzyme complex beta chain |
| | | | precursor, mitochondrial |
| JC2460 | 92 | PC | pyruvate carboxylase precursor |
| (AAH11617) | | | |
| JC4879 | 93 | SCHAD | 3-hydroxyacyl-CoA dehydrogenase, |
| (NP005318) | | | short chain-specific, precursor |
| KIHUA3 | 94 | AK3 | nucleoside-triphosphate-- |
| (AAH16180) | | | adenylate kinase 3 |
| M2GD_HUMAN | 95 | DMGD | dimethylglycine dehydrogenase, |
| (AAF21941) | | | mitochondrial precursor |
| | | | (ME2GLYDH) - human |
| MDHM_HUMA | 96 | MDH2 | malate dehydrogenase mitochondrial |
| (AAH01917) | | | precursor (fragment) |
| 075439 | 97 | PMPC | mitochondrial processing peptidase |
| | | | beta subunit precursor (beta-MPP) |
| | | | (P-52) |
| ODO1_MOUSE | 98 | Ogdh | 2-oxoglutarate dehydrogenase E1 |
| (AAC52130) | | | component (alpha-ketoglutarate |
| | | | dehydrogenase) (fragment) |
| ODPA_CAEEL | 99 | — | Probable pyruvate dehydrogenase E1 |
| (NP495693) | | | component, alpha subunit precursor |
| | | | (PDHE1-a) |
| OWHU | 100 | OTC | ornithine carbamoyltransferase |
| (NP000522) | | | precursor |
| OWMS | 101 | Otc | ornithine carbamoyltransferase |
| (CAA30121) | | | precursor |
| P21549 | 102 | AGXT | alanine--glyoxylate aminotransferase |
| (NP000021) | | | |
| PUT2_HUMAN | 103 | ALDH4 | Delta-1-pyrroline-5-carboxylate |
| (NP733844) | | | dehydrogenase precursor (P5C |
| | | | dehydrogenase) |
| Q0140 | 104 | VAR1 | VAR1 - mitochondrial ribosomal |
| (NP009320) | | | protein |
| Q10713 | 105 | KIAA0123 | mitochondrial processing peptidase |
| (NP055975) | | | alpha subunit precursor (alpha-MPP) |
| | | | (P-55) (HA1523) |
| Q16654 | 106 | PDK4 | pyruvate dehydrogenase kinase |
| (NP002603) | | | isoform 4 - human |
| ROHU | 107 | TST | thiosulfate sulfurtransferase |
| (CAA42060) | | | |
| S01174 | 108 | Got2 | aspartate transaminase precursor, |
| (NP034455) | | | mitochondrial |
| S08680 | 109 | Mut | methylmalonyl-CoA mutase alpha |
| (NP032676) | | | chain precursor |
| S13025 | 110 | nuo-40 | NADH dehydrogenase (ubiquinone) |
| (CAA39695) | | | 40K chain |
| S13048 | 111 | cyt | cytochrome c |
| (PI9974) | | | |
| S16239 | 112 | Glud | glutamate dehydrogenase (NAD(P)+) |
| (AAH57347) | | | precursor |
| S23506 | 113 | Pdhal | pyruvate dehydrogenase (lipoamide) |
| (NP032836) | | | |
| S25665 | 114 | DLAT_h | dihydrolipoamide S-acetyltransferase |
| (CAA32052) | | | heart - human (fragment) |
| S26984 | 115 | — | probable DNA-directed RNA |
| (P33540) | | | polymerase - mitochondrion plasmid |
| | | | maranhar (SGC3) |
| S32482 | 116 | ETFB | electron transfer flavoprotein beta |
| (NP001976) | | | chain |
| S38770 | 117 | Dci | 3,2-trans-enoyl-CoA isomerase, |
| (P42125) | | | mitochondrial precursor (dodecenoyl- |
| | | | CoA delta-isomerase) |
| S39807 | 118 | Bckdhb | 3-methyl-2-oxobutanoate |
| | | | dehydrogenase (lipoamide) beta chain |
| S40622 | 119 | MUT | methylmalonyl-CoA mutase precursror |
| (NP000246) | | | (MCM) |
| S41006 | 120 | — | hypothetical protein t05g5.6 |
| (CAE65137) | | | |
| S41563 | 121 | cit-1 | citrate (si)-synthase, mitochondrial |
| S42366 | 122 | PRSS15 | Lon proteinase homolog |
| S42370 | 123 | — | citrate synthase homolog |
| (NP499264) | | | |
| S47532 | 124 | HSPE1 | heat shock protein 10 |
| (NP002148) | | | |
| S53351 | 125 | ME2.1 | malate dehydrogenase (oxaloacetate- |
| (NP006671) | | | decarboxylating) (NADP+) precursor, |
| | | | mitochondrial |
| S60028 | 126 | Fdxr | ferredoxin--NADP+ reductase |
| (NP032023) | | | precursor |
| S65760 | 127 | Dbt | dihydrolipoamide transacylase |
| (NP034152) | | | precursor |
| S71881 | 128 | Bckdha | branched chain alpha-ketoacid |
| (NP031559) | | | dehydrogenase chain E1-alpha |
| | | | precursor |
| SCOT_HUMA | 129 | OXCT | Succinyl-CoA: 3-ketoacid-coenzyme A |
| (NP000427) | | | transferase precursor (succinyl CoA: |
| | | | 3-oxoacid CoA-transferase) (OXCT) |
| SODM_CAEEL | 130 | sod-2 | Superoxide dismutase precursor (Mn) |
| (NP492290) | | | |
| SODN_CAEEL | 131 | sod-3 | Superoxide dismutase precursor (Mn) |
| (NP510764) | | | |
| SYHUAE | 132 | ALAS2 | 5-aminolevulinate synthase 2 |
| SYHUAL | 133 | ALAS1 | 5-aminolevulinate synthase 1 |
| (NP000679) | | | precursor |
| SYLM_HUMAN | 134 | KIAA0028 | Probable leucyl-tRNA synthetase, |
| (NP056155) | | | mitochondrial precursor (Leucine-- |
| | | | tRNA ligase) (Leurs) (KIAA0028) |
| SYMSAL | 135 | Alas2 | 5-aminolevulinate synthase |
| | | | mitochondrial precursor (erythroid- |
| | | | specific) (ALAS-E) |
| SYNCLM | 136 | leu-5 | leucine--tRNA ligase precursor, |
| (XP323115) | | | mitochondrial |
| SYNCYT | 137 | cyt-18 | tyrosine--tRNA ligase precursor, |
| | | | mitochondrial |
| SYWM_CAEEL | 138 | — | Probable tryptophanyl-tRNA |
| (T15761) | | | synthetase, mitochondrial |
| | | | (tryptophan--tRNA ligase) (TRPRS) |
| THTR_MOUSE | 139 | Tst | thiosulfate sulfortransferase |
| (NP033463) | | | |
| U80034 | 140 | MIPEP | mitochondrial intermediate peptidase |
| (NP005923) | | | |
| U82328 | 141 | PDX1 | pyruvate dehydrogenase complex |
| (NP003468) | | | protein X subunit precursor |
| XNHUDM | 142 | GOT2 | aspartate transaminase precursor, |
| (NP002071) | | | mitochondrial |
| XNHUO | 143 | OAT | ornithine--oxo-acid transaminase |
| (NP000265) | | | precursor |
| XNHUSP | 144 | AGXT | serine--pyruvate aminotransferase |
| (NP000021) | | | (SPT) (alanine--glyoxylate |
| | | | aminotransferase) (AGT) |
| XNMSO | 145 | Oat | ornithine--oxo-acid transaminase |
| (AAH08119) | | | precursor |
| XXHU | 146 | DLAT | dihydrolipoamide S-acetyltransferase |
| | | | precursor (fragment) |
| YAL044c | 147 | GCV3 | GCV3 - glycine decarboxylase, subunit |
| (P39726) | | | H |
| YBL022c | 148 | PIM1 | PIM1 - ATP-dependent protease, |
| (NP009531) | | | mitochondrial |
| YBL038w | 149 | MRPL16 | MRPL16 - ribosomal protein of the |
| (NP009515) | | | large subunit, mitochondrial |
| YBL080c | 150 | PET112 | PET112 - required to maintain rho+ |
| (NP009473) | | | mitochondrial DNA |
| YBL090w | 151 | MRP21 | MRP21 - Mitochondrial ribosomal |
| (NP009463) | | | protein |
| YBR120c | 152 | CBP6 | CBP6 - apo-cytochrome B pre-mRNA |
| (NP009678) | | | processing protein |
| YBR122c | 153 | MRPL36 | MRPL36 - ribosomal protein YmL36 |
| (CAA55624) | | | precursor, mitochondrial |
| YBR146w | 154 | MRPS9 | MRPS9 - ribosomal protein S9 |
| (NP009704) | | | precursor, mitochondrial |
| YBR221c | 155 | PDB1 | PDB1 - pyruvate dehydrogenase |
| (NP009780) | | | (lipoamide) beta chain precursor |
| YBR227c | 156 | MCX1 | MCX1 - ClpX homologue in |
| (NP009786) | | | mitochondria |
| YBR251w | 157 | MRPS5 | MRPS5 - ribosomal protein S5, |
| (NP009810) | | | mitochondrial |
| YBR268w | 158 | MRPL37 | MRPL37 - ribosomal protein YmL37, |
| (NP009827) | | | mitochondrial |
| YBR282w | 159 | MRPL27 | MRPL27 - ribosomal protein YmL27 |
| (NP009841) | | | precursor, mitochondrial |
| YCR003w | 160 | MRPL32 | MRPL32 - ribosomal protein YmL32, |
| (NP009929) | | | mitochondrial |
| YCR024c | 161 | — | asn-tRNA synthetase, mitochondrial |
| (NP009953) | | | |
| YCR028c-a | 162 | RIM1 | RIM1 - ssDNA-binding protein, |
| (NP009958) | | | mitochondrial |
| YCR046c | 163 | IMG1 | IMG1 - ribosomal protein, |
| (NP009975) | | | mitochondrial |
| YDL202w | 164 | MRPL11 | MRPL11 - ribosomal protein of the |
| (NP010079) | | | large subunit, mitochondrial |
| YDR148c | 165 | KGD2 | KGD2 - 2-oxoglutarate dehydrogenase |
| (NP010432) | | | complex E2 component |
| YDR194c | 166 | MSS116 | MSS116 - RNA helicase of the DEAD |
| (NP010480) | | | box family, mitochondrial |
| YDR462w | 167 | MRPL28 | MRPL28 - ribosomal protein of the |
| (NP010750) | | | large subunit (YmL28), mitochondrial |
| YFL018c | 168 | LPD1 | LPD1 - dihydrolipoamide |
| (NP116635) | | | dehydrogenase precursor |
| YGR244c | 169 | LSC2 | succinate-CoA ligase beta subunit |
| (NP011760) | | | |
| YHR008c | 170 | SOD2 | SOD2 - superoxide dismutase (Mn) |
| (NP011872) | | | precursor, mitochondrial |
| YIL070c | 171 | MAM33 | MAM33 - mitochondrial acidic matrix |
| (NP012194) | | | protein |
| YJL096w | 172 | MRPL49 | MRPL49 - ribosomal protein YmL49, |
| (CAA89390) | | | mitochondrial |
| YJR113c | 173 | RSM7 | RSM7 - similarity to bacterial, |
| (NP012647) | | | chloroplast and mitochondrial |
| | | | ribosomal protein S7 |
| YKL040c | 174 | NFU1 | NFU1 - iron homeostasis |
| (NP012884) | | | |
| YLL027w | 175 | ISA1 | ISA1 - mitochondrial protein required |
| (NP013073) | | | for normal iron metabolism |
| YLR059c | 176 | REX2 | REX2 - putative 3′-5′ exonuclease |
| (NP013160) | | | |
| YML110c | 177 | COQ5 | COQ5 - ubiquinone biosynthesis, |
| (NP013597) | | | methyltransferase |
| YMR062c | 178 | ECM40 | ECM40 - acetylornithine |
| (NP013778) | | | acetyltransferase |
| YMR072w | 179 | ABF2 | ABF2 - high mobility group protein |
| (NP013788) | | | |
| YOL095c | 180 | HMI1 | HMI1 - mitochondrial DNA helicase |
| (NP014546) | | | |
| YOR040w | 181 | GLO4 | GLO4 - glyoxalase II |
| (NP014683) | | | (hydroxyacylglutathione hydrolase) |
| YOR142w | 182 | LSC1 | LSC1 - succinate-CoA ligase alpha |
| (NP014785) | | | subunit |
| YPL118w | 183 | MRP51 | MRP51 - strong similarity to |
| (NP015207) | | | S. kluyveri hypothetical protein |
| YPL135w | 184 | ISU1 | ISU1 - protein with similarity to |
| (NP015190) | | | iron-sulfur cluster nitrogen fixation |
| | | | proteins |
| YPL252c | 185 | YAH1 | YAH1 - similarity to adrenodoxin and |
| (NP015071) | | | ferrodoxin |
| YPL262w | 186 | FUM1 | FUM1 - fumarate hydratase |
| (NP015061) | | | |
| YPR047w | 187 | MSF1 | MSF1 - phenylalanine--tRNA ligase |
| (CAA89167) | | | alpha chain, mitochondrial |
| YPR067w | 188 | ISA2 | ISA2 - mitochondrial protein required |
| (NP015392) | | | for iron metabolism |

TABLE 2
Localization Signals for Targeting to the Chloroplast:

| Designation | SEQ. | |
|---|---|---|
| (Accession | ID | |
| No.) | NO. | Description |
| CA782533 | 189 | Transit peptide domain of the apicoblast |
| | | ribosomal protein S9 |
| P27456 | 190 | Pea glutathione reductase (GR) signal peptide |
| (CAA62482) | | |
| BAB91333 | 191 | NH₂-terminus of Cr-RSH encoding a putative |
| | | guanosine 3′,5′-bispyrophosphate (ppGpp) |
| | | synthase-degradase |
| CAB42546 | 192 | 14-3-3 proteins |
| AAC64139 | 193 | Chloroplast signal recognition particle including |
| AAC64109 | 194 | cpSRP54, cpSRP43 subunits or a fragment thereof |
| AAD01509 | 195 | |
| PWSPG, | 196 | Chloroplast transit peptides |
| FESP1, | 197 | |
| P00221, | 198 | |
| P05435, | 199 | |
| BAA37170, | 200 | |
| BAA37171, | 201 | |
| AAA81472 | 202 | |
| X52428 | 203 | AtOEP7, in particular the transmembrane domain |
| (CAA36675) | | (TMD) and its C-terminal neighboring seven-amino |
| | | acid region (see Lee Y J, Plant Cell 2001 Oct; |
| | | 13(10): 2175-90) |
| CA757092, | 204 | THI1 N-terminal chloroplastic transit peptide, in |
| CA755666 | 205 | particular 4 to 27 residues |

[0116] The identification of the specific sequences necessary for translocation of a linked protein into a chloroplast or mitochondria can be determined using predictive software known to those skilled in the art, including the tools located at http://wlww.mips.biochem.mpg.de/cgi-bin/proj/medgen/mitofilter.

### 5. Transfection of Plant Nuclei

[0117] Another embodiment provides methods and compositions for the transfection of plants, for example the delivery of a polynucleotide to the plant nucleus.

[0118] One embodiment of the present disclosure discloses transfecting a plant cell with the transfection complex comprises a recombinant polypeptide having a protein transduction domain and a nuclear localization signal in combination with a polynucleotide. In one embodiment, the polynucleotide encodes at least one protein with anti-microbial properties for expression in the plant. The protein may comprise an antibiotic. Additionally, a recombinant polynucleotide encoding at least one enzyme for converting hard-to-ferment sugars to more easily fermentable sugars for expression in the plant is utilized. In another embodiment, the polynucleotide encodes one or more enzymes capable of modulating the cellulose content of the transgenic plant. In one embodiment, the polynucleotide encodes for at least one protein promoting starch hydrolysis. In another embodiment, the polynucleotide encodes for proteins causing the plant to absorb environmental pollutants such as a metalloid such as arsenic or selenium, a heavy metal such as lead, chromium, cadmium, zinc, copper, or uramium, or a persistent organic pollutant such as DDT or PCBs.

### 6. Exemplary Cells and Cell Lines

[0119] In another embodiment, the transfection complex comprises a recombinant polypeptide having a protein transduction domain and an organelle localization signal in combination with a polynucleotide. The complex can be introduced into organelles of cells from a cell line. The cell line can be a transformed cell line that can be maintained indefinitely in cell culture, or the cell line can be a primary cell culture. Exemplary cell lines are those available from American Type Culture Collection including plant cell lines which are incorporated herein by reference. The nucleic acid can be replicated and transcribed within the nucleus of a cell of the transfected cell line. The targeting signal can be enzymatically cleaved if necessary such that the complex is free to remain in the target organelle.

[0120] Any eukaryotic cell can be transfected to produce organelles that express a specific nucleic acid, for example a metabolic gene, including primary cells as well as established cell lines. Suitable types of cells include but are not limited to undifferentiated or partially differentiated cells including stem cells, totipotent cells, pluripotent cells, embryonic stem cells, inner mass cells, adult stem cells, and cells derived from ectoderm, mesoderm, or endoderm. Suitable plant cells can be selected from monocots and dicots, and include corn, soybeans, legumes, grasses, and grains such as rice and wheat.

[0121] If the organelle to be targeted is a plastid, then the host cell can be selected from known eukaryotic photosynthetic cells. If the organelle to be transfected is the mitochondrion, than any eukaryotic cell can be used, including mammalian cells, for example human cells. The cells are transfected to either transiently or stably express the exogenous nucleic acid. In one embodiment a DNA construct encoding a reporter gene is integrated into the mitochondrial genome of a cell to produce a stable transgenic cell line that comprises organelles that express the desired reporter gene. In one embodiment, the polynucleotide encodes at least one protein with anti-microbial properties for expression in the plant. The protein may comprise an antibiotic.

[0122] In another embodiment, siRNA or antisense polynucleotides (including siRNA or antisense polynucleotides directed to mtDNA related proteins) can be transfected into an organelle using the compositions described herein.

### 7. Transgenic Organisms

[0123] Plants

[0124] The techniques described in the present disclosure can also be used to generated transgenic non-human animals. In particular, zygote microinjection, nuclear transfer, blastomere electrofusion and blastocyst injection of embryonic stem (ES) cell cybrids have each provided feasible strategies for creating hetero- and homoplasmic mice containing mtDNA from transfected cell lines (i.e. cells that containing transfected mitochondria). In one embodiment an embryonic stem (ES) cell is transfected and injected into the blastocyst of a mammalian embryo as a means of generating chimeric mice. In another embodiment, embryonic stem (ES) cell cybrids (from transfected cells and ES cell rhos, or from two separately transfected cells) are first prepared, followed by blastocyst injection into embryos. The use of cells carrying specific mtDNA of interest allows the creation of transmitochondrial mice that are heteroplasmic or even homoplasmic for the transfected DNA. In theory, this technique offers the prospect of transferring any mutant mtDNA that can be obtained from cultured transfected cells into a whole organism model. For example, this disclosed methods and compositions could be used to create mouse models of human mtDNA disease.

[0125] Using the disclosed compositions and methods for mtDNA transfection will allow investigations into questions such as the effect of varying proportions of the 5000 bp “common deletion”, which accumulates with aging, polymorphisms found in diabetes and neurodegenerative diseases, and dynamics of mtDNA complementation. There are also potential therapeutic uses of this approach. Targeted introduction of the normal mitochondrial genome offers treatment for both classic mtDNA-based diseases and diseases of aging such as neurodegenerative brain conditions and adult-onset diabetes, which have been associated with mtDNA-based mitochondrial dysfunction.

[0126] Non-human Organisms

[0127] Another embodiment of the disclosure provides transfected non-human organisms and methods making and using them. Single or multicellular non-human organisms, preferably non-human mammals, more preferably mice, can be transfected with the compositions described herein by administering the compositions of the present disclosure to the non-human organism. In one embodiment, the polynucleotide remains episomal and does not stably integrate into the genome of the host organism. In another embodiment, the polynucleotide prevents the expression of a gene of interest. Thus, the expression of the polynucleotide in the host can be controlled by the amount of polynucleotide administered to the host.

[0128] The disclosed transfected non-human organisms have several advantages over traditional transgenic organisms. For example, the transfected organism disclosed herein can be produced in less time that traditional transgenic organisms without sexual reproduction. Moreover, the expression of the polynucleotide of interest in the host can be directly regulated by the amount of polynucleotide of interest administered to the host. Dosage controlled expression of a polynucleotide of interest can be correlated to observed phenotypes and changes in the transfected animal. Additionally, inducible expression and/or replication control elements can be included in the polynucleotide of interest to provide inducible and dosage dependent expression and/or replication. Suitable inducible expression and/or replication control elements are known in the art.

### 8. Phytopathology

[0129] Embodiments of the present disclosure provide compositions and methods applicable for gene therapy protocols for plants. Organelle dysfunction can also be treated or reduced using the disclosed compositions and methods. In particular, problems with mitochondria or plastids can result in disease. Additionally, treating or modifying mitochondria or plastid genomes may provide resistance to plant pathogens and environmental conditions. Plant diseases are caused by pathogens and environmental conditions. Organisms that cause infectious disease include fungi, oomycetes, bacteria, viruses, viroids, virus-like organisms, phytoplasmas, protozoa, nematodes and parasitic plants. Included are insects, mites, vertebrate or other pests that affect plant health by consumption of plant tissues. Environmental conditions leading to plant pathology can include drought, frost damage and breakage by snow and hail, flooding and poor drainage, nutrient deficiency, salt deposition and other soluble mineral excesses, wind, wildfire, soil compaction, pollution of air and/or soil and herbicide. Plants or plant cells can be transfected with polynucleotides that increase resistance to stress. The polynucleotides can encode polypeptides that increase resistance to stress. Exemplary polypeptides capable of providing resistance to stress include but are not limited to transcription factors responsible for generating plant stress response genes such as CaKR1, AtNDPK2 and OsNAC6. Additionally, exemplary genes involved in plant resistance to stress are known in the art and can be found under the Generation Challenge Programme (GCP; www.generationcp.org). Thermostable proteins from the archaebacteria, including thermostable peroxidases are further examples.

[0130] In one embodiment the plant transfected using the disclosed compositions so that the plant can produce an antibiotic, for example an antibiotic peptide or protein with antibiotic capability (as in a antibiotic resistance gene) or to express a protein/pathway that would produce a metabolite with antibiotic function (as in penicillin).

[0131] In another embodiment the polynucleotide used to transfect the plant cell expresses at least one polypeptide capable of increasing the efficiency of photosynthesis compared to a control. Exemplary polypeptides capable of increasing the efficiency of photosynthesis include but are not limited to, ribulose-1,5-bisphosphate carboxylase/oxygenase (Rubisco) or modified forms thereof, a glycolate catabolic pathway from E. coli including glycolate dehydrogenase, glyoxylate carboligase, and tartronic semialdehyde reductase.

[0132] Still another embodiment provides transfecting the plant or plant cell with a polynucleotide that expresses at least one polypeptide capable of increasing the efficiency of oxidative phosphorylation compared to a control. Exemplary polypeptides capable of increasing the efficiency of oxidative phosphorylation include but are not limited to plant uncoupling proteins, alternative oxidase, antioxidant proteins such as superoxide dismutase and ascorbate peroxidase and alternative mtDNA genes such as yeast Ndi1. In another embodiment, plants are made to express genes, such as Guanidinoacetate N-methyltransferase, Glycine amidinotransferase and creatine kinase, involved in the formation of creatine and phospho-creatine which act as energy reservoirs.

[0133] The polynucleotide can also express at least one polypeptide capable of converting hard-to-ferment sugars, such as dextrins, to more easily fermentable sugars, such as glucose and maltose. Exemplary polypeptides capable of converting hard-to-ferment sugars to more easily fermentable sugars include but are not limited to alpha and beta-amylase, pectinase, glucoamylase, pullulanase and other enzymes utilized in the art for saccharification.

[0134] In another embodiment the polynucleotide expresses at least one polypeptide capable of modulating the cellulose content of a plant. Exemplary polypeptides capable of modulating the cellulose content of a plant include but are not limited to cellulases, glucanases, celludextrinase and avicelase found in fungi, bacteria and protozoans, among others. These include endo-cellulases, exo-cellulase, cellobiase or beta-glucosidase, oxidative cellulases such as cellobiose dehydrogenase and cellulose phosphorylases. Cellulases are well known in the art and are used in various processes in the textile industry, laundry detergents, pulp and paper industry and, more recently, biofuels. Furthermore, thermostable cellulases such as, Cel6A and Cel6B, from archaebacteria such as Thermobifida fusca are further examples.

[0135] In still another embodiment the polynucleotide expresses at least one polypeptide capable of promoting starch hydrolysis. Exemplary polypeptides capable of promoting starch hydrolysis include but are not limited to glycoside hydrolase enzymes also known as the family of amylase enzymes such as alpha, beta and gamma amylase.

[0136] In still another embodiment the polynucleotide expresses at least one polypeptide capable of accumulating useful oils, such as stearic acid, oleic acid, linoleic acid, among others, include but are not limited to 18:0-delta9-ACP desaturase, 18:1-deltal2-desaturase, 16:0-delta4-ACP desaturase, among others. Exemplary polypeptides capable of accumulating rubbers in plants include but are not limited to hydroxymethylglutaryl-CoA reductase, FPP synthase, mevalonate kinase, phosphomevalonate kinase, diphosphomevalonate decarboxylase, IPP isomerase and small rubber particle protein among others. Exemplary polypeptides capable of producing novel biomaterials such as polyhydroxyalkanoates (PHA), polyesters and silk proteins, include but are not limited to 3-ketothiolase, acetoacetyl-CoA reductase, PHB synthase, dragline and flageliform spider silk, among others.

[0137] In one embodiment the polynucleotide expresses at least one polypeptide with pharmaceutical or therapeutic utility. Exemplary polypeptides expressed in plants with pharmaceutical, neutraceutical or therapeutic utility include but are not limited to IgG, acetylcholinesterase, alpha-interferon, human alpha-1-antitrypsin, secretory IgA, interferon gamma, Cholera toxin B (CTB) antigen, Anthrax protective antigen, Plague vaccine antigen, Canine parvovirus (CPV) VP2 antigen, Insulin like growth factor (IGF-1), Human serum albumin (HSA), Antimicrobial peptide, and monoclonal antibodies such as Guy's 13.

[0138] Thus, embodiments of the present disclosure are directed to treating a plant disease by introducing a vector into the host cell wherein the vector specifically binds to the organelle and wherein the vector comprises a nucleic acid encoding at least one protein or peptide providing resistance to the phytopathology. The present disclosure encompasses manipulating, augmenting or replacing portions of the organellar genomes to treat plant diseases.

### 9. Administration

[0139] The compositions provided herein may be administered in a physiologically acceptable carrier to a host. Preferred methods of administration include systemic or direct administration to a cell. The compositions can be administered to a cell or plant, as is generally known in the art for gene delivery applications. In gene delivery applications, the compositions are introduced into cells in order to transfect an organelle. The modified complex compositions can be combined in admixture with an acceptable carrier vehicle. Therapeutic formulations are prepared for storage by mixing the active ingredient having the desired degree of purity with optional physiologically acceptable carriers, excipients or stabilizers (Remingtons Pharmaceutical Sciences 16th edition, Osol, A. Ed. (1980)), in the form of lyophilized formulations or aqueous solutions. Acceptable carriers, excipients or stabilizers are nontoxic to recipients at the dosages and concentrations employed, and include buffers such as phosphate, citrate and other organic acids; antioxidants including ascorbic acid; low molecular weight (less than about 10 residues) polypeptides; proteins, such as serum albumin, gelatin or immunoglobulins; hydrophilic polymers such as polyvinylpyrrolidone, amino acids such as glycine, glutamine, asparagine, arginine or lysine; monosaccharides, disaccharides and other carbohydrates including glucose, mannose, or dextrins; chelating agents such as EDTA; sugar alcohols such as mannitol or sorbitol; salt-forming counterions such as sodium; and/or nonionic surfactants such as Tween®, Pluronics® or PEG.

[0140] The compositions of the present disclosure can be administered parenterally. As used herein, “parenteral administration” is characterized by administering a pharmaceutical composition through a physical breach of plant tissue. Parenteral administration includes administering by injection, through a surgical incision, or through a tissue-penetrating wound, and the like.

[0141] Parenteral formulations can include the active ingredient combined with a pharmaceutically acceptable carrier, such as sterile water or sterile isotonic saline. Such formulations may be prepared, packaged, or sold in a form suitable for bolus administration or for continuous administration. Injectable formulations may be prepared, packaged, or sold in unit dosage form, such as in ampules or in multi-dose containers containing a preservative. Parenteral administration formulations include suspensions, solutions, emulsions in oily or aqueous vehicles, pastes, reconsitutable dry (i.e. powder or granular) formulations, and implantable sustained-release or biodegradable formulations. Such formulations may also include one or more additional ingredients including suspending, stabilizing, or dispersing agents. Parenteral formulations may be prepared, packaged, or sold in the form of a sterile injectable aqueous or oily suspension or solution. Parenteral formulations may also include dispersing agents, wetting agents, or suspending agents described herein. Methods for preparing these types of formulations are known. Sterile injectable formulations may be prepared using non-toxic parenterally-acceptable diluents or solvents, such as water, 1,3-butane diol, Ringer's solution, isotonic sodium chloride solution, and fixed oils such as synthetic monoglycerides or diglycerides. Other parentally-administrable formulations include microcrystalline forms, liposomal preparations, and biodegradable polymer systems. Compositions for sustained release or implantation may include pharmaceutically acceptable polymeric or hydrophobic materials such as emulsions, ion exchange resins, sparingly soluble polymers, and sparingly soluble salts.

[0142] As used herein, “additional ingredients” include one or more of the following: excipients, surface active agents, dispersing agents, inert diluents, granulating agents, disintegrating agents, binding agents, lubricating agents, sweetening agents, flavoring agents, coloring agents, preservatives, physiologically degradable compositions (e.g., gelatin), aqueous vehicles, aqueous solvents, oily vehicles and oily solvents, suspending agents, dispersing agents, wetting agents, emulsifying agents, demulcents, buffers, salts, thickening agents, fillers, emulsifying agents, antioxidants, antibiotics, antifungal agents, stabilizing agents, and pharmaceutically acceptable polymeric or hydrophobic materials. Other “additional ingredients” which may be included in the pharmaceutical compositions are known. Suitable additional ingredients are described in Remington's Pharmaceutical Sciences, Mack Publishing Co., Genaro, ed., Easton, Pa. (1985).

[0143] Dosages and desired concentrations modified vectors disclosed herein in gene delivery compositions of the present disclosure may vary depending on the particular use envisioned. The determination of the appropriate dosage or route of administration is well within the skill the art.

### EXAMPLES

### Example 1

### Recombinant Constructs

[0144] The 11 amino acid protein transduction domain (PTD) consisting of 11 arginines was cloned upstream and in frame of the chloroplast localization signal (CLS) of the chloroplast targeted chaperonin, Cpn21, of Arabidopsis thaliana (gi: 12643263). The PTD-CLS was cloned in frame and upstream of the cDNA of TFAM and cloned into a bacterial expression vector. The recombinant protein was expressed in bacteria and isolated. Purified protein was concentrated and protein concentration was assessed with the Bradford Assay (Biorad). Purified protein was analyzed with SDS-Page to verify purity.

### Example 2

### Construct Sequence Data

[0145] PTD-CLS-TFAM Sequence (PTD underlined; Chloroplast Localization Signal from chloroplast targeted chaperonin, Cpn21, of A. thaliana double underlined; TFAM dash underline) Peptide Sequence Length: 292 aa

[chemical structure]

[0146] PTD-MLS-TFAM Sequence (PTD underlined; Plant Mitochondrial Localization Signal from A.thaliana malate dehydrogenase double underlined; TFAM dash underline) Peptide Sequence Length: 263 aa

[chemical structure]

[0147] PTD-NLS-TFAM Sequence (PTD underlined; Plant Nuclear Localization Signal from Maize Opaque2 transcription factor double underlined; TFAM dash underline) Peptide Sequence Length: 272 aa

[chemical structure]

Selected Model Organism Protein Similarities
That Can Be Used In The Compositions And Methods Disclosed Herein:
Organism, Protein And Percent Identity And Length Of Aligned Region

| | | |
|---|---|---|
| H. sapiens | sp: Q00059 - MTT1_HUMAN | 100%/246 aa |
| (SEQ. ID. NO.: 211): | Transcription factor 1, | (see ProtEST) |
| | mitochondrial precursor | |
| | (MTTF1) | |
| M. musculus | ref: NP_033386.1 - | 63%/237 aa |
| (SEQ. ID. NO.: 212): | transcription factor A, | (see ProtEST) |
| | mitochondrial | |
| | [Mus musculus] | |
| R. norvegicus: | ref: NP_112616.1 - | 64%/237 aa |
| (SEQ. ID. NO.: 213): | transcription factor A, | (see ProtEST) |
| | mitochondrial | |
| | [Rattus norvegicus] | |
| A. thaliana | ref: NP_192846.1 - | 27%/189 aa |
| (SEQ. ID. NO.: 214):: | 98b like protein | (see ProtEST) |
| | [Arabidopsis thaliana] | |
| C. elegans | ref: NP_501245.1 - | 27%/189 aa |
| (SEQ. ID. NO.: 215):: | F45E4.9.p | (see ProtEST) |
| | [Caenorhabditis elegans] | |
| D. melanogaster: | ref: NP_524415.1 - | 34%/183 aa |
| (SEQ. ID. NO.: 216): | mitochondrial | (see ProtEST) |
| | transcription factor A | |
| | [Drosophila melanogaster] | |

[0148] Sequence data for the sequences referenced herein are known in the art, for example in GenBank, and are incorporated by reference herein, in their entirety.

[0149] It should be emphasized that the above-described embodiments of the present disclosure, particularly, any “preferred” embodiments, are merely possible examples of implementations, merely set forth for a clear understanding of the principles of the disclosure. Many variations and modifications may be made to the above-described embodiment(s) of the disclosure without departing substantially from the spirit and principles of the disclosure. All such modifications and variations are intended to be included herein within the scope of this disclosure and the present disclosure and protected by the following claims.

The application's sequence listing, which the Patent Office published only in electronic form, follows.

SEQUENCE LISTING (217 sequences)

SEQ ID NO: 1 - protein, 11 aa, Human immunodeficiency virus
YGRKKRRQRRR

SEQ ID NO: 2 - protein, 9 aa, Human immunodeficiency virus
RKKRRQRRR

SEQ ID NO: 3 - protein, 7 aa, artificial sequence
  AP-1 concensus site
TGACTCA

SEQ ID NO: 4 - protein, 16 aa, Drosophila melanogaster
RQIKIWFQNRRMKWKK

SEQ ID NO: 5 - protein, 86 aa, HIV
MEPVDPRLEPWKHPGSQPKTACTNCYCKKCCFHCQVCFITKALGISYGRKKRRQRRRAHQNSETHQASLSKQPTSQPRGDPTGPKE

SEQ ID NO: 6 - protein, 7 aa, artificial sequence
  protein transduction domain
RRRRRRR

SEQ ID NO: 7 - protein, 12 aa, artificial sequence
  protein transduction domain
RRQRRTSKLMKR

SEQ ID NO: 8 - protein, 27 aa, artificial sequence
  protein transduction domain
GWTLNSAGYLLGKINLKALAALAKKIL

SEQ ID NO: 9 - protein, 29 aa, artificial sequence
  protein transduction domain
WEAKLAKALAKALAKHLAKALAKALKCEA

SEQ ID NO: 10 - protein, 7 aa, artificial sequence
  SV40 Tantigen nuclear localization signal
PKKKRKV

SEQ ID NO: 11 - protein, 7 aa, artificial sequence
  nuclear localization signal
GKKRSKV

SEQ ID NO: 12 - protein, 7 aa, artificial sequence
  nuclear localization signal
KSRKRKL

SEQ ID NO: 13 - protein, 19 aa, artificial sequence
  nuclear localization signal
KRPAATKKAGQAKKKKLDK

SEQ ID NO: 14 - protein, 20 aa, artificial sequence
  nuclear localization signal
RKKRKTEEESPLKDKAKKSK

SEQ ID NO: 15 - protein, 20 aa, artificial sequence
  nuclear localization signal
KDCVMNKHHRNRCQYCRLQR

SEQ ID NO: 16 - protein, 9 aa, artificial sequence
  nuclear localization signal
PAAKRVKLD

SEQ ID NO: 17 - protein, 20 aa, artificial sequence
  nuclear localization signal
KKYENVVIKRSPRKRGRPRK

SEQ ID NO: 18 - protein, 252 aa, Mus musculus
MRALVAVKRVIDFAVKIRVKPDKSGVVTDGVKHSMNPFCEIAVEEAVRLKEKKLVKEIIAVSCGPSQCQETIRTALAMGADRGIHVEIPGAQAESLGPLQVARVLAKLAEKEKVDLLFLGKQAIDDDCNQTGQMTAGLLDWPQGTFASQVTLEGDKVKVEREIDGGLETLRLKLPAVVTADLRLNEPRYATLPNIMKAKKKKIEVVKAGDLGVDLTSKVSVISVEEPPQRSAGVKVETTEDLVAKLKEVGRI

SEQ ID NO: 19 - protein, 333 aa, Mus musculus
MFRAAAPGQLRRAASLLRFQSTLVIAEHANDSLAPITLNTITAAGRLGGEVSCLVAGTKCDKVVQDLCKVAGVAKVLVAQHDAYKGLLPEELTPLILETQKQFSYTHICAGASAFGKNLLPRVAAKLNVAPVSDIIEIKSPDTFVRTIYAGNALCTVKCDEKVKVFSVRGTSFEAAATSGGSASSEKAPSSSSVGISEWLDQKLTKSDPPELTGAKVVVSGGRGLKSGENFKLLYDLADQLHAAVGASRAAVDAGFVPNDMQVGQTGKIVAPELYIAVGISGAIQHLAGMKDSKTIVAINKDPEAPIFQVADYGIVADLFKVVPEMTEILKKK

SEQ ID NO: 20 - protein, 509 aa, Homo sapiens
MQSWSRVYCSLAKRGHFNRISHGLQGLSAVPLRTYADQPIDADVTVIGSGPGGYVAAIKAAQLGFKTVCIEKNETLGGTCLNVGCIPSKALLNNSHYYHMAHGTDFASRGIEMSEVRLNLDKMMEQKSTAVKALTGGIAHLFKQNKVVHVNGYGKITGKNQVTATKADGGTQVIDTKNILIATGSEVTPFPGITIDEDTIVSSTGALSLKKVPEKMVVIGAGVIGVELGSVWQRLGADVTAVEFLGHVGGVGIDMEISKNFQRILQKQGFKFKLNTKVTGATKKSDGKIDVSIEAASGGKAEVITCDVLLVCIGRRPFTKNLGLEELGIELDPRGRIPVNTRFQTKIPNIYAIGDVVAGPMLAHKAEDEGIICVEGMAGGAVHIDYNCVPSVIYTHPEVAWVGKSEEQLKEEGIEYKVGKFPFAANSRAKTNADTDGMVKILGQKSTDRVLGAHILGPGAGEMVNEAALALEYGASCEDIARVCHAHPTLSEAFREANLAASFGKSINF

SEQ ID NO: 21 - protein, 227 aa, Mus musculus
MGASGRLLRAVIMGAPGSGKGTVSSRITKHFELKHLSSGDLLRQNMLQGTEIGVLAKTFIDQGKLIPDDVMTRLALHELKTLTQCSWLLDGFPRTLPQAEALDKVYQIDTVINLNVPFEVIKQRLTARWIHPASGRVYNIEFNPPKTVGIDDLTGEPLIQREDDKPETVIKRLKAYEAQTEPVLQYYQKKGVLETFSGTETNKIWPHVYSFLQTKVPETTQKASVTP

SEQ ID NO: 22 - protein, 464 aa, Mus musculus
MALLTAATRLLGAKNSSCLVLAARHASASSTNLKDVLSNLIPKEQARIKTFKQQHGKTVVGQITVDMMYGGMRGMKGLVYETSVLDPDEGIRFRGYSIPECQKMLPKAKGGEEPLPEGLFWLLVTGQMPTEEQVSWLSREWAKRAALPSHVVTMLDNFPTNLHPMSQLSAAITALNSESNFARAYAEGMNRAKYWELIYEDCMDLIAKLPCVAAKIYRNLYREGSSIGAIDSRLDWSHNFTNMLGYTDPQFTELMRLYLTIHSDHEGGNVSAHTSHLVGSALSDPYLSFAAAMNGLAGPLHGLANQEVLVWLTQLQKEVGKDVSDEKLRDYIWNTLNSGRVVPGYGHAVLRKTDPRYSCQREFALKHLPKDPMFKLVAQLYKIVPNILLEQGKAKNPWPNVDAHSGVLLQYYGMTEMNYYTVLFGVSRALGVLAQLIWSRALGFPLERPKSMSTDGLMKFVDSK

SEQ ID NO: 23 - protein, 1500 aa, Homo sapiens
MTRILTAFKVVRTLKTGFGFTNVTAHQKWKFSRPGIRLLSVKAQTAHIVLEDGTKMKGYSFGHPSSVAGEVVFNTGLGGYPEAITDPAYKGQILTMANPIIGNGGAPDTTALDELGLSKYLESNGIKVSGLLVLDYSKDYNHWLATKSLGQWLQEEKVPAIYGVDTRMLTKIIRDKGTMLGKIEFEGQPVDFVDPNKQNLIAEVSTKDVKVYGKGNPTKVVAVDCGIKNNVIRLLVKRGAEVHLVPWNHDFTKMEYDGILIAGGPGNPALAEPLIQNVRKILESDRKEPLFGISTGNLITGLAAGAKTYKMSMANRGQNQPVLNITNKQAFITAQNHGYALDNTLPAGWKPLFVNVNDQTNEGIMHESKPFFAVQFHPEVTPGPIDTEYLFDSFFSLIKKGKATTITSVLPKPALVASRVEVSKVLILGSGGLSIGQAGEFDYSGSQAVKAMKEENVKTVLMNPNIASVQTNEVGLKQADTVYFLPITPQFVTEVIKAEQPDGLILGMGGQTALNCGVELFKRGVLKEYGVKVLGTSVESIMATEDRQLFSDKLNEINEKIAPSFAVESIEDALKAADTIGYPVMIRSAYALGGLGSGICPNRETLMDLSTKAFAMTNQILVEKSVTGWKEIEYEVVRDADDNCVTVCNMENVDAMGVHTGDSVVVAPAQTLSNAEFQMLRRTSINVVRHLGIVGECNIQFALHPTSMEYCIIEVNARLSRSSALASKATGYPLAFIAAKIALGIPLPEIKNVVSGKTSACFEPSLDYMVTKIPRWDLDRFHGTSSRIGSSMKSVGEVMAIGRTFEESFQKALRMCHPSIEGFTPRLPMNKEWPSNLDLRKELSEPSSTRIYAIAKAIDDNMSLDEIEKLTYIDKWFLYKMRDILNMEKTLKGLNSESMTEETLKRAKEIGFSDKQISKCLGLTEAQTRELRLKKNIHPWVKQIDTLAAEYPSVTNYLYVTYNGQEHDVNFDDHGMMVLGCGPYHIGSSVEFDWCAVSSIRTLRQLGKKTVVVNCNPETVSTDFDECDKLYFEELSLERILDIYHQEACGGCIISVGGQIPNNLAVPLYKNGVKIMGTSPLQIDRAEDRSIFSAVLDELKVAQAPWKAVNTLNEALEFAKSVDYPCLLRPSYVLSGSAMNVVFSEDEMKKFLEEATRVSQEHPVVLTKFVEGAREVEMDAVGKDGRVISHAISEHVEDAGVHSGDATLMLPTQTISQGAIEKVKDATRKIAKAFAISGPFNVQFLVKGNDVLVIECNLRASRSFPFVSKTLGVDFIDVATKVMIGENVDEKHLPTLDHPIIPADYVAIKAPMFSWPRLRDADPILRCEMASTGEVACFGEGIHTAFLKAMLSTGFKIPQKGILIGIQQSFRPRFLGVAEQLHNEGFKLFATEATSDWLNANNVPATPVAWPSQEGQNPSLSSIRKLIRDGSIDLVINLPNNNTKFVHDNYVIRRTAVDSGIPLLTNFQVTKLFAEAVQKSRKVDSKSLFHYRQYSAGKAA

SEQ ID NO: 24 - protein, 572 aa, Mus musculus
MEPRAPRRRHTHQRGYLLTRDPHLNKDLAFTLEERQQLNIHGLLPPCIISQELQVLRIIKNFERLNSDFDRYLLLMDLQDRNEKLFYSVLMSDVEKFMPIVYTPTVGLACQQYSLAFRKPRGLFISIHDKGHIASVLNAWPEDVVKAIVVTDGERILGLGDLGCNGMGIPVGKLALYTACGGVNPQQCLPITLDVGTENEELLKDPLYIGLRHRRVRGPEYDAFLDEFMEAASSKYGMNCLIQFEDFANRNAFRLLNKYRNKYCTFNDDIQGTASVAVAGLLAALRITKNKLSDQTVLFQGAGEAALGIAHLVVMAMEKEGLSKENARKKIWLVDSKGLIVKGRASLTEEKEVFAHEHEEMKNLEAIVQKIKPTALIGVAAIGGAFTEQILKDMAAFNERPIIFALSSPTSKAECSADECYKVTKGRAIFASGSPFDPVTLPDGRTLFPGQGNNSYVFPGVALGVVACGLRHIDDKVFLTTREVISQQVSDKHLQEGRLYPPLNTIRGVSLKIAVKIVQDAYKEKMATVYPEPQNKEEFVSSQMYSTNYDQILPDCYPWPAEVQKIQTKVNQ

SEQ ID NO: 25 - protein, 724 aa, Mus musculus
MAGQWVRTVALLAARRHWRRSSQQQLLGTLKHAPVYSYQCLVVSRSLSSVEYEPKEKTFDKILIANRGEIACRVIKTCKKMGIKTVAIHSDVDASSVHVKMADEAVCVGPAPTSKSYLNMDAIMEAIKKTRAQAVHPGYGFLSENKEFAKRLAAEDVTFIGPDTHAIQAMGDKIESKLLAKRAKVNTIPGFDGVVKDADEAVRIAREIGYPVMIKASAGGGGKGMRIAWDDEETRDGFRFSSQEAASSFGDDRLLIEKFIDNPRHIEIQVLGDKHGNALWLNERECSIQRRNQKVVEEAPSIFLDPETRQAMGEQAVALAKAVKYSSAGTVEFLVDSQKNFYFLEMNTRLQVEHPVTECITGLDLVQEMILVAKGYPLRHKQEDIPISGWAVECRVYAEDPYKSFGLPSIGRLSQYQEPIHLPGVRVDSGIQPGSDISIYYDPMISKLVTYGSDRAEALKRMEDALDNYVIRGVTHNIPLLREVIINTRFVKGDISAKFLSDVYPDGFKGHTLTLSERNQLLAIASSVFVASQLRAQRFQEHSRVPVIRPDVAKWELSVKVHDEDHTVVASNNGPAFTVEVDGSKLNVTSTWNLASPLLSVNVDGTQRTVQCLSREAGGNMSIQFLGTVYKVHILTKLAAELNKFMLEKVPKDTSSTLCSPMPGVVVAVSVKPGDMVAEGQEICVIEAMKMQNSMTAGKMGKVKLVHCKAGDTVGEGDLLVELE

SEQ ID NO: 26 - protein, 703 aa, Homo sapiens
MLSAALRTLKHVLYYSRQCLMVSRNLGSVGYDPNEKTFDKILVANRGEIACRVIRTCKKMGIKTVAIHSDVDASSVHVKMADEAVCVGPAPTSKSYLNMDAIMEAIKKTRAQAVHPGYGFLSENKEFARCLAAEDVVFIGPDTHAIQAMGDKIESKLLAKKAEVNTIPGFDGVVKDAEEAVRIAREIGYPVMIKASAGGGGKGMRIAWDDEETRDGFRLSSQEAASSFGDDRLLIEKFIDNPRHIEIQVLGDKHGNALWLNERECSIQRRNQKVVEEAPSIFLDAETRRAMGEQAVALARAVKYSSAGTVEFLVDSKKNFYFLEMNTRLQVEHPVTECITGLDLVQEMIRVAKGYPLRHKQADIRINGWAVECRVYAEDPYKSFGLPSIGRLSQYQEPLHLPGVRVDSGIQPGSDISIYYDPMISKLITYGSDRTEALKRMADALDNYVIRGVTHNIALLREVIINSRFVKGDISTKFLSDVYPDGFKGHMLTKSEKNQLLAIASSLFVAFQLRAQHFQENSRMPVIKPDIANWELSVKLHDKVHTVVASNNGSVFSVEVDGSKLNVTSTWNLASPLLSVSVDGTQRTVQCLSREAGGNMSIQFLGTVYKVNILTRLAAELNKFMLEKVTEDTSSVLRSPMPGVVVAVSVKPGDAVAEGQEICVIEAMKMQNSMTAGKTGTVKSVHCQAGDTVGEGDLLVELE

SEQ ID NO: 27 - protein, 244 aa, Mus musculus
MKLNFSGLRALVTGAGKGIGRDTVKALHASGAKVVAVTRTNSDLVSLAKECPGIEPVCVDLGDWDATEKALGGIGPVDLLVNNAALVIMQPFLEVTKEAFDRSFSVNLRSVFQVSQMVARDMINRGVPGSIVNVSSMVAHVTFPNLITYSSTKGAMTMLTKAMAMELGPHKIRVNSVNPTVVLTDMGKKVSADPEFARKLKERHPLRKFAEVEDVVNSILFLLSDRSASTSGGGILVDAGYLAS

SEQ ID NO: 28 - protein, 476 aa, Neurospora crassa
MASRRLALNLAQGVKARAGGVINPFRRGLATPHSGTGIKTQTTTLKNGLTVASQYSPYAQTSTVGMWIDAGSRAETDETNGTAHFLEHLAFKGTTKRTQQQLELEIENMGAHLNAYTSRENTVYFAKALNEDVPKCVDILQDILQNSKLEESAIERERDVILRESEEVEKQLEEVVFDHLHATAYQHQPLGRTILGPRENIRDITRTELVNYIKNNYTADRMVLVGAGGVPHEQLVEMADKYFSKLPATAPVSSASILSKKKPDFIGSDIRIRDDTIPTANIAIAVEGVSWSDDDYFTGLVTQAIVGNYDKALGNAPHQGSKLSGFVHKHDLATSFMSFSTSYSDTGLWGIYLVTDKLDRVDDLVHFSLREWTRLCSNVSEAEVERAKAQLKASILLSLDGTTAVAEDIGRQIVTTGRRMSPAEIERIIDAVSAKDVMDFANKKIWDQDIAISAVGSIEGLFDYARIRGDMSRNAF

SEQ ID NO: 29 - protein, 412 aa, Homo sapiens
MAAALLARASGPARRALCPRAWRQLHTIYQSVELPETHQMLLQTCRDFAEKELFPIAAQVDKEHLFPAAQVKKMGGLGLLAMDVPEELGGAGLDYLAYAIAMEEISRGCASTGVIMSVNNSLYLGPILKFGSKEQKQAWVTPFTSGDKIGCFALSEPGNGSDAGAASTTARAEGDSWVLNGTKAWITNAWEASAAVVFASTDRALQNKGISAFLVPMPTPGLTLGKKEDKLGIRGSSTANLIFEDCRIPKDSILGEPGMGFKIAMQTLDMGRIGIASQALGIAQTALDCAVNYAENRMAFGAPLTKLQVIQFKLADMALALESARLLTWRAAMLKDNKKPFIKEAAMAKLAASEAATAISHQAIQILGGMGYVTEMPAERHYRDARITEIYEGTSEIQRLVIAGHLLRSYRS

SEQ ID NO: 30 - protein, 333 aa, Homo sapiens
MFRAAAPGQLRRAASLLRFQSTLVIAEHANDSLAPITLNTITAATRLGGEVSCLVAGTKCDKVAQDLCKVAGIAKVLVAQHDVYKGLLPEELTPLILATQKQFNYTHICAGASAFGKNLLPRVAAKLEVAPISDIIAIKSPDTFVRTIYAGNALCTVKCDEKVKVFSVRGTSFDAAATSGGSASSEKASSTSPVEISEWLDQKLTKSDRPELTGAKVVVSGGRGLKSGENFKLLYDLADQLHAAVGASRAAVDAGFVPNDMQVGQTGKIVAPELYIAVGISGAIQHLAGMKDSKTIVAINKDPEAPIFQVADYGIVADLFKVVPEMTEILKKK

SEQ ID NO: 31 - protein, 482 aa, Homo sapiens
MAAVRMLRTWSRNAGKLICVRYFQTCGNVHVLKPNYVCFFGYPSFKYSHPHHFLKTTAALRGQVVQFKLSDIGEGIREVTVKEWYVKEGDTVSQFDSICEVQSDKASVTITSRYDGVIKKLYYNLDDIAYVGKPLVDIETEALKDSEEDVVETPAVSHDEHTHQEIKGRKTLATPAVRRLAMENNIKLSEVVGSGKDGRILKEDILNYLEKQTGAILPPSPKVEIMPPPPKPKDMTVPILVSKPPVFTGKDKTEPIKGFQKAMVKTMSAALKIPHFGYCDEIDLTELVKLREELKPIAFARGIKLSFMPFFLKAASLGLLPFPILNASVDENCQNITYKASHNIGIAMDTEQGVIVPNVKNVQICSIFDIATELNRLQKLGSVGQLSTTDLTGGTFTLSNIGSIGGTFAKPVIMPPEVAIGALGSIKAIPRFNQKGEVYKAQIMNVSWSADHRVIDGATMSRFSNLWKSYLENPAFMLLDLK

SEQ ID NO: 32 - protein, 573 aa, Homo sapiens
MLRLPTVFRQMRPVSRVLAPHLTRAYAKDVKFGADARALMLQGVDLLADAVAVTMGPKGRTVIIEQSWGSPKVTKDGVTVAKSIDLKDKYKNIGAKLVQDVANNTNEEAGDGTTTATVLARSIAKEGFEKISKGANPVEIRRGVMLAVDAVIAELKKQSKPVTTPEEIAQVATISANGDKEIGNIISDAMKKVGRKGVITVKDGKTLNDELEIIEGMKFDRGYISPYFINTSKGQKCEFQDAYVLLSEKKISSIQSIVPALEIANAHRKPLVIIAEDVDGEALSTLVLNRLKVGLQVVAVKAPGFGDNRKNQLKDMAIATGGAVFGEEGLTLNLEDVQPHDLGKVGEVIVTKDDAMLLKGKGDKAQIEKRIQEIIEQLDVTTSEYEKEKLNERLAKLSDGVAVLKVGGTSDVEVNEKKDRVTDALNATRAAVEEGIVLGGGCALLRCIPALDSLTPANEDQKIGIEIIKRTLKIPAMTIAKNAGVEGSLIVEKIMQSSSEVGYDAMAGDFVNMVEKGIIDPTKVVRTALLDAAGVASLLTTAEVVVTEIPKEEKDPGMGAMGGMGGGMGGGMF

SEQ ID NO: 33 - protein, 577 aa, Neurospora crassa
MLNRFRPARLVAQSSRCLPLTRARAGPLPVNNARTLATRAAAVNTKEPTERDNITTLSNGVRVASEDLPDAFSGVGVYIDAGSRYENDYVRGASHIMDRLAFKSTSTRTADEMLETVEKLGGNIQCASSRESMMYQAATFNKAIPTAVELMAETIRDPKLTDEELEGQIMTAQYEVNEIWSKAELILPELVHMAAFKDNTLGNPLLCPKERLDYINRDVIQTYRDAFYRPERLVVAFAGVPHERAVKLAEKYFGDMKASDAPGLSRTGSETSVDSLVSESSEASSESSSSSSDSSESSGGLLSKLFSPKAKKATPNPFLTRVPISTEDLTRPAHYTGGFLTLPSQPPPLNPNLPTFTHIQLAFEGLAISDDDIYALATLQTLLGGGGSFSAGGPGKGMYSRLYTNVLNQHGWVESCVAFNHSYTDSGLFGIAASCYPGRTLPMLQVMCRELHALTTDHGYSALGELEVSRAKNQLRSSLLMNLESRMVELEDLGRQVQVHGRKIPVREMTRRINELTVKDLRRVAKRVVGGMANNAGQGSGAPTVVLQEATVQGLKTTELGWDQIQDTIAQWKLGRR

SEQ ID NO: 34 - protein, 423 aa, Homo sapiens
MATATRLLGWRVASWRLRPPLAGFVSQRAHSLLPVDDAINGLSEEQRQLRQTMAKFLQEHLAPKAQEIDRSNEFKNLREFWKQLGNLGVLGITAPVQYGGSGLGYLEHVLVMEEISRASGAVGLSYGAHSNLCINQLVRNGNEAQKEKYLPKLISGEYIGALAMSEPNAGSDVVSMKLKAEKKGNHYILNGNKFWITNGPDADVLIVYAKTDLAAVPASRGITAFIVEKGMPGFSTSKKLDKLGMRGSNTCELIFEDCKIPAANILGHENKGVYVLMSGLDLERLVLAGGPLGLMQAVLDHTIPYLHVREAFGQKIGHFQLMQGKMADMYTRLMACRQYVYNVAKACDEGHCTAKDCAGVILYSAECATQVALDGIQCFGGNGYINDFPMGRFLRDAKLYEIGAGTSEVRRLVIGRAFNADFH

SEQ ID NO: 35 - protein, 392 aa, Homo sapiens
MAVVAAAAGWLLRLRAAGAEGHWRRLPGAGLARGFLHPAATVEDAAQRRQVAHFTFQPDPEPREYGQTQKMNLFQSVTSALDNSLAKDPTAVIFGEDVAFGGVFRCTVGLRDKYGKDRVFNTPLCEQGIVGFGIGIAVTGATAIAEIQFADYIFPAFDQIVNEAAKYRYRSGDLFNCGSLTIRSPWGCVGHGALYHSQSPEAFFAHCPGIKVVIPRSPFQAKGLLLSCIEDKNPCIFFEPKILYRAAAEEVPIEPYNIPLSQAEVIQEGSDVTLVAWGTQVHVIREVASMAKEKLGVSCEVIDLRTIIPWDVDTICKSVIKTGRLLISHEAPLTGGFASEISSTVQEECFLNLEAPISRVCGYDTPFPHIFEPFYIPDKWKCYDALRKMINY

SEQ ID NO: 36 - protein, 1000 aa, Homo sapiens
MFHLRTCAAKLRPLTASQTVKTFSQNRPAAARTFQQIRCYSAPVAAEPFLSGTSSNYVEEMYCAWLENPKSVHKSWDIFFRNTNAGAPPATLPESPSLSRGSLAAVAHAQSLVEAQPNVDKLVEDHLAVQSLIRAYQIRGHHVAQLDPLGILDADLDSSVAPLTLSHPQTDLGWMSLTSTRSSTCPPTTFIGGQESALPLREIIRRLEMAYCQHIGVEFMFINDLEQCQWIRQKFETPGIMQFTNEEKRTLLARLVRSTRFEEFLQRKWSSEKRFGLEGCEVLIPALKTIIDKSSENGVDYVIMGMPHRGRLNVLANVIRKELEQIFCQFDSKLEAADEGLRRCEVPPGHVSPQDQSCHRPGTLPCPWWPNPSHLEAADPVVMGKTKAEQFYCGDTEGKKVMSILLHGDAAFAGQGIVYETFHLSDLPSYTTHGTVHVVVNNQIGFTTDPRMARSSPYPTDVARVVNAPIFHVNSDDPEAVMYVCKVAAEWRSTFHKDVVVDLVCYRRNGHNEMDEPMFTQPLMYKQIRKQKPVLQKYAELLVSQGVVNQPEYEEEISKYDKICEEAFARSKDEKILHIKHWLDSPWPGFFTLDGQPRSMSCPSTGLTEDILTHIGNVASSVPVENFTIHGGLSRILKTRGEMVKNRTVDWALAEYMAFGSLLKEGIHIRLSGQDVERGTFSHRHHVLHDQNVDKRTCIPMNHLWPNQAPYTVCNSSLSEYGVLGFGAGLRMASPNALVLWEAQFGDFHNTAQCIIDQFICPGQAKWVRQNGIVLLLPLGMEGMGPEHSSGPPRAFLQMCNDDPDVLPDLKEANFDINQLYDCNWVVVNCSTPGNFFHVLRRQILLPFRKPLIIFTPKSLLRHPEARSSFDEMLPGTHFQRVIPEDGPAAQNPENVKRLLFCTGKVYYDLTRERKARDMVGQVAITRIEHVSPFPFDLLLKEVQKYPNAELAWCQEEHKNQGYYDYVKPRLRTTISRAKPVWYAGRDPAAAPRTGNKKTH

SEQ ID NO: 37 - protein, 584 aa, Homo sapiens
MLSRLRVVSTTCTLACRHLHIKEKGKPLMLNPRTNKGMAFTLQERQMLGLQGLLPPKIETQDIQALRFHRNLKKMTSPLEKYIYIMGIQERNEKLFYRILQDDIESLMPIVYTPTVGLACSQYGHIFRRPKGLFISISDRGHVRSIVDNWPENHVKAVVVTDGERILGLGDLGVYGMGIPVGKLCLYTACAGIRPDRCLPVCIDVGTDNIALLKDPFYMGLYQKRDRTQQYDDLIDEFMKAITDRYGRNTLIQFEDFGNHNAFRFLRKYREKYCTFNDDIQGTAAVALAGLLAAQKVISKPISEHKILFLGAGEAALGIANLIVMSMVENGLSEQEAQKKIWMFDKYGLLVKGRKAKIDSYQEPFTHSAPESIPDTFEDAVNILKPSTIIGVAGAGRLFTPDVIRAMASINERPVIFALSNPTAQAECTAEEAYTLTEGRCLFASGSPFGPVKLTDGRVFTPGQGNNVYIFPGVALAVILCNTRHISDSVFLEAAKALTSQLTDEELAQGRLYPPLANIQEVSINIAIKVTEYLYANKMAFRYPEPEDKAKYVKERTWRSEYDSLLPDVYEWPESASSPPVITE

SEQ ID NO: 38 - protein, 496 aa, Homo sapiens
MASRCWRWWGWSAWPRTRLPPAGSTPSFCHHFSTQEKTPQICVVGSGPAGFYTAQHLLKHPQAHVDIYEKQPVPFGLVRFGVAPDHPEVKNVINTFTQTAHSGRCAFWGNVEVGRDVTVPELQEAYHAVVLSYGAEDHRALEIPGEELPGVCSARAFVGWYNGLPENQELEPDLSCDTAVILGQGNVALDVARILLTPPEHLEALLLCQRTDITLAALGVLRQSRVKTVWLVGRRGPLQVAFTILELREMIQLPGARPILDPVDFLGLQDKIKEVPRPRKRLTELLLRTATEKPGPAEAARQASASRAWGLRFFRSPQQVLPSPDGRRAAGVRLAVTRLEGVDEATRAVPTGDMEDLPCGLVLSSIGYKSRPVDPSVPFDSKLGVIPNVEGRVMDVPGLYCSGWVLRGPTGVIATTMTDSFLTGQMLLQDLKAGLLPSGPRPGYAAIQALLSSRGVRPVSFSDWKLDAEEVARGQGTGKPREKLVDPQGMLRLLGH

SEQ ID NO: 39 - protein, 430 aa, Homo sapiens [sequence omitted]

SEQ ID NO: 40 - protein, 517 aa, Homo sapiens [sequence omitted]

SEQ ID NO: 41 - protein, 207 aa, Homo sapiens
MLALRCGSRWLGLLSVPRSVPLRLPAARACSKGSGDPSSSSSSGNPLVYLDVDANGKPLGRVVLELKADVVPKTAENFRALCTGEKGFGYKGSTFHRVIPSFMCQAGDFTNHNGTGGKSIYGSRFPDENFTLKHVGPGVLSMANAGPNTNGSQFFICTIKTDWLDGKHVVFGHVKEGMDVVKKIESFGSKSGRTSKKIVITDCGQLS

SEQ ID NO: 42 - protein, 453 aa, Neurospora crassa
MFSRLAARLPKASALNGVAARQVRNLSQPAITGSKGRNMPAREPRTTAAATGAEATFTIRDGPVFQGTAFGANTNISGEAVFTTSLVGYPESMTDPSYRGQILVFTQPLIGNYGVPSNERDEFNLLSTSSLPTSSAPVSLSPMSLPSTATGLLFRAWASGAPARAFPPLSGVDTRAIVTYLREQGSSLARISIGDEYDADEDEGFIDPGQINLVKRVSTKAPFVVTNPNAKFHVALIDCGVKENILRSLVSRGASVTVFPYNYPIHKVAENFDGVFISNGPGDPTHCQETVYNLAKLMETSPIPIMGICLGHQLLALAVGAKTIKLSMVIRAHNIPALDLTTGQCHITSQNHGYAVDISTLPSDFKEYFVNLNDGSNEGMMHKTRPIFSTQFHPEAKGGPMDSSYLFDKYMENVELFKSNSQVYRDNRPTQFMIDILSKERVGVEPTPLSNAA

SEQ ID NO: 43 - protein, 343 aa, Homo sapiens
GLRPPPPGRFSRLPGKTLSACDRENGARRPLLLGSTSFIPIGRRTYASAAEPVGSKAVLVTGCDSGFGFSLAKHLHSKGFLVFAGCLMKDKGHDGVKELDSLNSDRLRTVQLNVFRSEEVEKVVGDCPFEPEGPEKGMWGLVNNAGISTFGEVEFTSLETYKQVAEVNLWGTVRMTKSFLPLIRRAKGRVVNISSMLGRMANPARSPYCITKFGVEAFSDCLRYEMYPLGVKVSVVEPGNFIAATSLYNPESIQAIAKKMWEELPEVVRKDYGKKYFDEKIAKMETYCSSGSTDTSPVIDAVTHALTATTPYTRYHPMDYYWWLRMQIMTHLPGAISDMIYIR

SEQ ID NO: 44 - protein, 325 aa, Homo sapiens
MAAMRKALPRRLVGLASLRAVSTSSMGTLPKRVKIVEVGPRDGLQNEKNIVSTPVKIKLIDMLSEAGLSVIETTSFVSPKWVPQMGDHTEVLKGIQKFPGINYPVLTPNLKGFEAAVAAGAKEVVIFGAASELFTKKNINCSIEESFQRFDAILKAAQSANISVRGYVSCALGCPYEGKISPAKVAEVTKKFYSMGCYEISLGDTIGVGTPGIMKDMLSAVMQEVPLAALAVHCHDTYGQALANTLMALQMGVSVVDSSVAGLGGCPYAQGASGNLATEDLVYMLEGLGIHTGVNLQKLLEAGNFICQALNRKTSSKVAQATCKL

SEQ ID NO: 45 - protein, 1178 aa, Mus musculus
MLKFQTVRGGLRLLGVRRSSSAPVASPNVRRLEYKPIKKVMVANRGEIAIRVFRACTELGIRTVAVYSEQDTGQMHRQKADEAYLIGRGLAPVQAYLHIPDIIKVAKENGVDAVHPGYGFLSERADFAQACQDAGVRFIGPSPEVVRKMGDKVEARAIAIAAGVPVVPGTDSPISSLHEAHEFSNTFGFPIIFKAAYGGGGRGMRVVHSYEELEENYTRAYSEALAAFGNGALFVEKFIEKPRHIEVQILGDQYGNILHLYERDCSIQRRHQKVVEIAPATHLDPQLRSRLTSDSVKLAKQVGYENAGTVEFLVDKHGKHYFIEVNSRLQVEHTVTEEITDVDLVHAQIHVSEGRSLPDLGLRQENIRINGCAIQCRVTTEDPARSFQPDTGRIEVFRSGEGMGIRLDNASAFQGAVISPHYDSLLVKVIAHGKDHPTAATKMSRALAEFRVRGVKTNIPFLQNVLNNQQFLAGTVDTQFIDENPELFQLRPAQNRAQKLLHYLGHVMVNGPTTPIPVNVSPSPVDPAVPVVPIGPPPAGFRDILLREGPEGFARAVRNHQGLLLMDTTFRDAHQSLLATRVRTHDLKKIAPYVAHNFNKLFSMENWGGATFDVAMRFLYECPWRRLQELRELIPNIPFQMLLRGANAVGYTNYPDNVVFKFCEVAKENGMDVFRVFDSLNYLPNMLLGMEAAGSAGGVVEAAISYTGDVADPSRTKYSLEYYMGLAEELVRAGTHILCIKDMAGLLKPAACTMLVSSLRDRFPDLPLHIHTHDTSGAGVAAMLACAQAGADVVDVAVDSMSGMTSQPSMGALVACTKGTPLDTEVPLERVFDYSEYWEGARGLYAAFDCTATMKSGNSDVYENEIPGGQYTNLHFQAHSMGLGSKFKEVKKAYVEANQMLGDLIKVTPSSKIVGDLAQFMVQNGLSRAEAEAQAEELSFPRSVVEFLQGYIGIPHGGFPEPFRSKVLKDLPRIEGRPGASLPPLNLKELEKDLIDRHGEEVTPEDVLSAAMYPDVFAQFKDFTATFGPLDSLNTRLFLQGPKIAEEFEVELERGKTLHIKALAVSDLNRAGQRQVFFELNGQLRSILVKDTQAMKEMHFHPKALKDVKGQIGAPMPGKVIDIKVAAGDKVAKGQPLCVLSAMKMETVVTSPMEGTIRKVHVTKDMTLEGDDLILEIE

SEQ ID NO: 46 - protein, 539 aa, Homo sapiens
MAAALRVAAVGARLSVLASGLRAAVRSLCSQATSVNERIENKRRTALLGGGQRRIDAQHKRGKLTARERISLLLDPGSFVESDMFVEHRCADFGMAADKNKFPGDSVVTGRGRINGRLVYVFSQDFTVFGGSLSGAHAQKICKIMDQAITVGAPVIGLNDSGGARIQEGVESLAGYADIFLRNVTASGVIPQISLIMGPCAGGAVYSPALTDFTFMVKDTSYLFITGPDVVKSVTNEDVTQEELGGAKTHTTMSGVAHRAFENDVDALCNLRDFFNYLPLSSQDPAPVRECHDPSDRLVPELDTIVPLESTKAYNMVDIIHSVVDEREFFEIMPNYAKNIIVGFARMNGRTVGIVGNQPKVASGCLDINSSVKGARFVRFCDAFNIPLITFVDVPGFLPGTAQEYGGIIRHGAKLLYAFAEATVPKVTVITRKAYGGAYDVMSSKHLCGDTNYAWPTAEIAVMGAKGAVEIIFKGHENVEAAQAEYIEKFANPFPAAVRGFVDDIIQPSSTRARICCDLDVLASKKVQRPWRKHANIPL

SEQ ID NO: 47 - protein, 558 aa, Homo sapiens
MYRYLAKALLPSRAGPAALGSAANHSAALLGRGRGQPAAASQPGLALAARRHYSELVADREDDPNFFKMVEGFFDRGASIVEDKLVKDLRTQESEEQKRNRVRGILRIIKPCNHVLSLSFPIRRDDGSWEVIEGYRAQHSQHRTPCKGGIRYSTDVSVDEVKALASLMTYKCAVVDVPFGGAKAGVKINPKNYTENELEKITRRFTMELAKKGFIGPGVDVPAPDMNTGEREMSWIADTYASTIGHYDINAHACVTGKPISQGGIHGRISATGRGVFHGIENFINEASYMSILGMTPGFRDKTFVVQGFGNVGLHSMRYLHRFGAKCIAVGESDGSIWNPDGIDPKELEDFKLQHGSILGFPKAKPYEGSILEVDCDILIPAATEKQLTKSNAPRVKAKIIAEGANGPTTPEADKIFLERNILVIPDLYLNAGGVTVSYFEWLKNLNHVSYGRLTFKYERDSNYHLLLSVQESLERKFGKHGGTIPIVPTAEFQDSISGASEKDIVHSALAYTMERSARQIMHTAMKYNLGLDLRTAAYVNAIEKVFKVYSEAGVTFT

SEQ ID NO: 48 - protein, 102 aa, Mus musculus
MAGQAFRKFLPLFDRVLVERSAAETVTKGGIMLPEKSQGKVLQATVVAVGSGGKGKSGEIEPVSVKVGDKVLLPEYGGTKVVLDDKDYFLFRDSDILGKYVD

SEQ ID NO: 49 - protein, 432 aa, Homo sapiens
MEGLAVRLLRGSRLLRRNFLTCLSSWKIPPHVSKSSQSEALLNITNNGIHFAPLQTFTDEEMMIKSSVKKFAQEQIAPLVSTMDENSKMEKSVIQGLFQQGLMGIEVDPEYGGTGASFLSTVLVIEELAKVDASVAVFCEIQNTLINTLIRKHGTEEQKATYLPQLTTEKVGSFCLSEAGAGSDSFALKTRADKEGDYYVLNGSKMWISSAEHAGLFLVMANVDPTIGYKGITSFLVDRDTPGLHIGKPENKLGLRASSTCPLTFENVKVPEANILGQIGHGYKYAIGSLNEGRIGIAAQMLGLAQGCFDYTIPYIKERIQFGKRLFDFQGLQHQVAHVATQLEAARLLTYNAARLLEAGKPFIKEASMAKYYASEIAGQTTSKCIEWMGGVGYTKDYPVEKYFRDAKIGTIYEGASNIQLNTIAKHIDAEY

SEQ ID NO: 50 - protein, 302 aa, Homo sapiens
MALVASVRVPARVLLRAGARLPGAALGRTERAAGGGDGARRFGSQRVLVEPDAGAGVAVMKFKNPPVNSLSLEFLTELVISLEKLENDKSFRGVILTSDRPGVFSAGLDLTEMCGRSPAHYAGYWKAVQELWLRLYQSNLVLVSAINGACPAGGCLVALTCDYRILADNPRYCIGLNETQLGIIAPFWLKDTLENTIGHRAAERALQLGLLFPPAEALQVGIVDQVVPEEQVQSTALSAIAQWMAIPDHARQLTKAMMRKATASRLVTQRDADVQNFVSFISKDSIQKSLQMYLERLKEEKG

SEQ ID NO: 51 - protein, 421 aa, Mus musculus [sequence omitted]

SEQ ID NO: 52 - DNA, 2875 bp, Homo sapiens
acggctccgcccttctcaagatggcgctgcactcaatgcggaaagcgcgtgagcgctggagcttcatccgggcacttcataagggatccgcagctgctcccgctctccagaaagacagcaagaagcgagtattttccggcattcaacctacaggaatcctccacctgggcaattacctgggagccattgagagctgggtgaggttacaggatgaatatgactctgtattatacagcattgttgacctccactccattactgtcccccaagacccagctgtccttcggcagagcatcctggacatgactgctgttcttcttgcctgtggcataaacccggaaaaaagcatccttttccaacaatctcaggtgtctgaacacacacaattaagttggatcctttcctgcatggtcagactacctcgattacaacatttacatcagtggaaggcaaagactaccaagcagaagcacgatggcacggtgggcctgctcacatacccagtactccaggcagccgacattctgttgtacaagtccacacacgttcctgttggggaggatcaagtccagcacatggaactagttcaggatctagcacaaggtttcaacaagaagtatggggagttctttccagtgcccgagtccattctcagtatgtgtgtgttggtgtttttaacctagcatccatgaagaaggtaaaatccctacgtgatccttctgccaaaatgtcgaaatcagaccctgacaaactggccaccgtccgaataacagacagcccagaggagatagtgcagaaattccgcaaggctgtgacagacttcacctcggaggtcacctatgacccggctggccgcgctggcgtgtccaacatagtggcggtgcatgccgcggtgacggggctctccgtggaggaagtggtgcgccgcagcgcgggcatgaacactgctcgctacaagctggccgtggcagatgctgtgattgagaagtttgccccaattaagcgtgaaattgaaaaactgaagctggacaaggaccatttagagaaggttttacaaattggatcagcaaaagccaaagaattagcatacactgtgtgccaggaggtgaagaaattggtgggttttctataggaagtttcaacgaatcacagcaaggcttttgtgccttgcactccatgcattctgataacggcagctttcctaaaaagaaaaagttatagttttgggacatttaatttggtatagctgattattggctttatttgatgaatattgctttgtagctttgaaatacgacagtgttccaaatcccatcaacaaaatgctgtgaacaacaacaacaaaaaataaatcaagaaggcatagctgtctgaatccccaattattgaggcacactccttggcctgcagaaatgtgattgaagtaaggagtaatttgggaaatggagtatcatttgtgcttctctctggagtacttactgtaacagatgcacacgttatctacttcaacccttttataaagcaatatatagaggtcttagatgtataatccttgagatgccatttgatcagatgccaatttgtattcagagctcataaaaacaagtccattcttatagtttgtttgtcactgagacggtgcctgatttaatatatttaagctgcttaacttgttttccaagagataacaccaactgttccagcaataatttgttttttaattcagagatatgggatatgatcttctaaggaggttgcattattttgacctgatttatttattgtacaagagcccaagtccctgaattatattcttaataagtgctttcttgcattcatttcagtttagtctcaccaaccccctatgaattaggagaattattgtcattttacacatgaggaaagtgaggctgagagaatccaattagcttgtacgatatcactccataagagaagcaaatctgagagtaaaacccttaccccttattcttaagaatagtgcttgtttattcagtacaaaaaaaatgctgaaaggcagcgttttttagactctaaacattctgattttgaaggtgggtgttggaacgactgatgatgttttttatatcatcaattcagccaatggatgcgaacttaaaatctggattcacagaaccgtggtcacatttccccatcaaaatccccaaggcgggtcccaagttctctcctctacgctcattgcagaaatactttgaaataggttctgccagtctacaatagcagtgaagactgacaaatcagatattcccaatgactgacagcttctcatcttgcctctacctcagttaagtaatgtcaccctgaaacctagcttttctgcacttccatttctgacacctgaaaatgaaaatgataatcctaacttatacaccaagacctgttagcaagatcgattttgtaacagaaattgcttataagttttttatcagtaaggaccatgatcaccatttgtacatacataactaggttgttgagcaaagcatttttgctcatgtttcttaaggaagtagagtagtccttgtgtcagaacacatgttaatccacaaaacgccgcatcccagattccaaattaaaacatcgtttttaggattcttggagctagcctggatcatgggtaaaggaaacattttgccttttgtatcttatactggaatgggatgtctgtaagtcctagaacctctttgagcatatttcttacaagcctctgttttttcccctttaaaggaaactttgaaaggattgtgaatactggaaaatgacaaaactaaaggtagatctatcaagccaaaaaaaaaaaaaaaaaaaaaaaaaaaaaaaaaaaaaaaaaaaaaaaaaa

SEQ ID NO: 53 - protein, 518 aa, Homo sapiens
MAASMARRLWPLLTRRGFRPRGGCISNDSPRRSFTTEKRNRNLLYEYAREGYSALPQLDIERFCACPEEAAHALELRKGELRSADLPAIISTWQELRQLQEQIRSLEEEKAAVTEAVRALLANQDSGEVQQDPKYQGLRARGREIRKELVHLYPREAQLEEQFYLQALKLPNQTHPDVPVGDESQARVLHMVGDKPVFSFQPRGHLEIGEKLDIIRQKRLSHVSGHRSYYLRGAGALLQHGLVNFTFNKLLRRGFTPMTVPDLLRGAVFEGCGMTPNANPSQIYNIDPARFKDLNLAGTAEVGLAGYFMDHTVAFRDLPVRMVCSSTCYRAETNTGQEPRGLYRVHHFTKVEMFGVTGPGLEQSSQLLEEFLSLQMEILTELGLHFRVLDMPTQELGLPAYRKFDIEAWMPGRGRFGEVTSASNCTDFQSRRLHIMFQTEAGELQFAHTVNATACAVPRLLIALLESNQQKDGSVLVPPALQSYLGTDRITAPTHVPLQYIGPNQPRKPGLPGQPAVS

SEQ ID NO: 54 - protein, 430 aa, Mus musculus
MAARLLLRSLRVLKARSAPRPPPSARCSHSGAEARLETPSAKKLTDVGIRRIFSSEHDIFRESVRKFFQEEVIPHHTEWEKAGEVSREVWEKAGKQGLLGINIAEKHGGIGGDLLSTAVTWEEQAYSNCTGPGFSLHSDIVMPYIANYGTKEQIEKFIPQMTAGKCIGAIAMTEPGAGSDLQGVRTNAKRSGSDWILNGSKVFITNGWLSDLVIVVAVTNREARSPAHGISLFLVENGMKGFIKGRKLHKMGMKAQDTAELFFEDVRLPANALLGEENKGFYYLMQELPQERLLIAELAISACEFMFEETRNYVKQRKAFGKTVAHIQTVQHKLAELKTHICVTRAFVDSCLQLHETKRLDSGSASMAKYWASELQNSVAYECVQLHGGWGYMWEYPIAKAYVDARVQPIYGGTNEIMKELIARQIVSDS

SEQ ID NO: 55 - protein, 466 aa, Homo sapiens
MALLTAAARLLGTKNASCLVLAARHASASSTNLKDILADLIPKEQARIKTFRQQHGKTVVGQITVDMMYGGMRGMKGLVYETSVLDPDEGIRFRGFSIPECQKLLPKAKGGEEPLPEGLFWLLVTGCIPTEEQVSWLSKEWAKRAALPSHVVTMLDNFPTNLHPMSQLSAAVTALNSESNFAQAYARGISRTKYWELIYEDSVDLIAKLPCVAAKIYRNLYWEGSGIGAIDSNLDWSHNFTNMLGYTDHQFTELMRLYLTIHSDHEGGNVSAHTSHLVGSALSDPYLSFAAAMNGLAGPLHGLANQEVLVWLTQLQKEVGKDVSDEKLRDYIWNTLNSGRVVPGYGHAVLRKTDPRYTCQREFALKHLPNDPMFKLVAQLYKIVPNVLLEQGKAKNPWPNVDAHSGVLLQYYGMTEMNYYTVLFGVSRALGVLAQLIWSRALGFPLERPKSMSTEGLMKFVDSKSG

SEQ ID NO: 56 - protein, 451 aa, Homo sapiens
MVGSALRRGAHAYVYLVSKASHISRGHQHQAWGSRPPAAECATQRAPGSVVELLGKSYPQDDHSNLTRKVLTRVGRNLHNQQHHPLWLIKERVKEHFYKQYVGRFGTPLFSVYDNLSPVVTTWQNFDSLLIPADHPSRKKGDNYYLNRTHMLRAHTSAHQWDLLHAGLDAFLVVGDVYRRDQIDSQHYPIFHQLEAVRLFSKHELFAGIKDGESLQLFEQSSRSAHKQETHTMEAVKLVEFDLKQTLTRLMAHLFGDELEIRWVDCYFPFTHPSFEMEINFHGEWLEVLGCGVMEQQLVNSAGAQDRIGWAFGLGLERLAMILYDIPDIRLFWCEDERFLKQFCVSNINQKVKFQPLSKYPAVINDISFWLPSENYAENDFYDLVRTIGGDLVEKVDLIDKFVHPKTHKTSHCYRITYRHMERTLSQREVRHIHQALQEAAVQLLGVEGRF

SEQ ID NO: 57 - protein, 213 aa, Homo sapiens
MAAPAVSGLSRQVRCFSTSVVRPFAKLVRPPVQVYGIEGRYATALYSAASKQNKLEQVEKELLRVAQILKEPKVAASVLNPYVKRSIKVKSLNDITAKERFSPLTTNLINLLAENGRLSNTQGVVSAFSTMMSVHRGEVPCTVTSASPLEEATLSELKTVLKSFLSQGQVLKLEAKTDPSILGGMIVRIGEKYVDMSVKTKIQKLGRAMREIV

SEQ ID NO: 58 - protein, 184 aa, Homo sapiens
MAAAGGARLLRAASAVLGGPAGRWLHHAGSRAGSSGLLRNRGPGGSAEASRSLSVSARARSSSEDKITVHFINRDGETLTTKGKVGDSLLDVVVENNLDIDGFGACEGTLACSTCHLIFEDHIYEKLDAITDEENDMLDLAYGLTDRSRLGCQICLTKSMDNMTVRVPETVADARQSIDVGKTS

SEQ ID NO: 59 - protein, 105 aa, Homo sapiens
MGDVEKGKKIFIMKCSQCHTVEKGGKHKTGPNLHGLFGRKTGQAPGYSYTAANKNKGIIWGEDTLMEYLENPKKYIPGTKMIFVGIKKKEERADLIAYLKKATNE

SEQ ID NO: 60 - protein, 108 aa, Neurospora crassa
MGFSAGDSKKGANLFKTRCAQCHTLEEGGGNKIGPALHGLFGRKTGSVDGYAYTDANKQKGITWDENTLFEYLENPKKYIPGTKMAFGGLKKDKDRNDIITFMKEATA

SEQ ID NO: 61 - protein, 903 aa, Homo sapiens
MASVWQRLGFYASLLKRQLNGGPDVIKWERRVIPGCTRSIYSATGKWTKEYTLQTRKDVEKWWHQRIKEQASKISEADKSKPKFYVLSMFPYPSGKLHMGHVRVYTISDTIARFQKMRGMQVINPMGWDAFGLPAENAAVERNLHPQSWTQSNIKHMRKQLDRLGLCFSWDREITTCLPDYYKWTQYLFIKLYEAGLAYQKEALVNWDPVDQTVLANEQVDEHGCSWRSGAKVEQKYLRQWFIKTTAYAKAMQDALADLPEWYGIKGMQAHWIGDCVGCHLDFTLKVHGQATGEKLTAYTATPEAIYGTSHVAISPSHRLLHGHSSLKEALRMALVPGKDCLTPVMAVNMLTQQEVPVVILAKADLEGSLDSKIGIPSTSSEDTILAQTLGLAYSEVIETLPDGTERLSSSAEFTGMTRQDAFLALTQKARGKRVGGDVTSDKLKDWLISRQRYWGTPIPIVHCPVCGPTPVPLEDLPVTLPNIASFTGKGGPPLAMASEWVNCSCPRCKGAAKRETDTMDTFVDSAWYYFRYTDPHNPHSPFNTAVADYWMPVDLYIGGKEHAVMHLFYARFFSHFCHDQKMVKHREPFHKLLAQGLIKGQTFRLPSGQYLQREEVDLTGSVPVHAKTKEKLEVTWEKMSKSKHNGVDPEEVVEQYGIDTIRLYILFAAPPEKDILWDVKTDALPGVLRWQQRLWTLTTRFIEARASGKSPQPQLLSNKEKAEARKLWEYKNSVISQVTTHFTEDFSLNSAISQLMGLSNALSQASQSVILHSPEFEDALCALMVMAAPLAPHVTSEIWAGLALVPRKLCAHYTWDASVLLQAWPAVDPEFLQQPEVVQMAVLINNKACGKIPVPQQVARDQDKVHEFVLQSELGVRLLQGRSIKKSFLSPRTALINFLVQD

SEQ ID NO: 62 - protein, 103 aa, Homo sapiens
MWRVCARRAQNVAPWAGLEARWTALQEVPGTPRVTSRSGPAPVRRNSVTTGYGGVRALCGWTPSSGATPRNRLLLQLLGSPGRRYYSLPPHQKVPLPSLSPTM

SEQ ID NO: 63 - protein, 102 aa, Mus musculus; identical to SEQ ID NO: 48

SEQ ID NO: 64 - protein, 568 aa, Caenorhabditis elegans
MLRLARKGLQTAVVRSYAKDVKFGAEGRQAMLVGVNLLADAVSVTMGPKGRNVIIEQSWGSPKITKDGVTVAKSIDLKDKYQNLGAKLIQDVANKANEEAGDGTTCATVLARAIAKEGFESIRQGGNAVEIRRGVMNAVEVVVAELKKISKKVTTPEEIAQVATISANGDTVVGNLISDAMKKVGTTGVITVKDGKTLNDELELIEGMKFDRGYISPYFITSAKGAKVEYEKALVLLSEKKISQVQDIVPALELANKLRRPLVIIAEDVDGEALTTLVLNRLKVGLQVVAIKAPGFGDNRKNTLKDMGIATGATIFGDDSNLIKIEDITANDLGEVDEVTITKDDTLLLRGRGDQTEIEKRIEHITDEIEQSTSDYEKEKLNERLAKLSKGVAVLKIGGGSEVEVGEKKDRVTDALCATRAAVEEGIVPGGGVALLRSLTALKNYKAANEDQQIGVNIVKKALTQPIATIVKNAGLEPSSIIDEVTGNSNTSYGYDALNGKFVDMFEAGIIDPTKVVRTALQDASGVASLLATTECVVTEIPKEEAVGGPAGGMGGMGGMGGMGGMGF

SEQ ID NO: 65 - protein, 517 aa, Homo sapiens
MLRAAARFGPRLGRRLLSAAATQAVPAPNQQPEVFCNQIFINNEWHDAVSRKTFPTVNPSTGEVICQVAEGDKEDVDKAVKAARAAFQLGSPWRRMDASHRGRLLNRLADLIERDRTYLAALETLDNGKPYVISYLVDLDMVLKCLRYYAGWADKYHGKTIPIDGDFFSYTRHEPVGVCGQIIPWNFPLLMQAWKLGPALATGNVVVMKVAEQTPLTALYVANLIKEAGFPPGVVNIVPGFGPTAGAAIASHEDVDKVAFTGSTEIGRVIQVAAGSSNLKRVTLELGGKSPNIIMSDADMDWAVEQAHFALFFNQGQCCCAGSRTFVQEDIYDEFVERSVARAKSRVVGNPFDSKTEQGPQVDETQFKKILGYINTGKQEGAKLLCGGGIAADRGYFIQPTVFGDVQDGMTIAKEEIFGPVMQILKFKTIEEVVGRANNSTYGLAAAVFTKDLDKANYLSQALQAGTVWVNCYDVFGAQSPFGGYKMSGSGRELGEYGLQAYTEVKTVTVKVPQKNS

SEQ ID NO: 66 - protein, 558 aa, Homo sapiens
MYRYLGEALLLSRAGPAALGSASADSAALLGWARGQPAAAPQPGLALAARRHYSEAVADREDDPNFFKMVEGFFDRGASIVEDKLVEDLRTRESEEQKRNRVRGILRIIKPCNHVLSLSFPIRRDDGSWEVIEGYRAQHSQHRTPCKGGIRYSTDVSVDEVKALASLMTYKCAVVDVPFGGAKAGVKINPKNYTDNELEKITRRFTMELAKKGFIGPGIDVPAPDMSTGEREMSWIADTYASTIGHYDINAHACVTGKPISQGGIHGRISATGRGVFHGIENFINEASYMSILGMTPGFGDKTFVVQGFGNVGLHSMRYLHRFGAKCIAVGESDGSIWNPDGIDPKELEDFKLQHGSILGFPKAKPYEGSILEADCDILIPAASEKQLTKSNAPRVKAKIIAEGANGPTTPEADKIFLERNIMVIPDLYLNAGGVTVSYFEWLKNLNHVSYGRLTFKYERDSNYHLLMSVQESLERKFGKHGGTIPIVPTAEFQDRISGASEKDIVHSGLAYTMERSARQIMRTAMKYNLGLDLRTAAYVNAIEKVFKVYNEAGVTFT

SEQ ID NO: 67 - protein, 509 aa, Homo sapiens; identical to SEQ ID NO: 20

SEQ ID NO: 68 - protein, 390 aa, Homo sapiens
MRKMLAAVSRVLSGASQKPASRVLVASRNFANDATFEIKKCDLHRLEEGPPVTTVLTREDGLKYYRMMQTVRRMELKADQLYKQKIIRGFCHLCDGQEACCVGLEAGINPTDHLITAYRAHGFTFTRGLSVREILAELTGRKGGCAKGKGGSMHMYAKNFYGGNGIVGAQVPLGAGIALACKYNGKDEVCLTLYGDGAANQGQIFEAYNMAALWKLPCIFICENNRYGMGTSVERAAASTDYYKRGDFIPGLRVDGMDILCVREATRFAAAYCRSGKGPILMELQTYRYHGHSMSDPGVSYRTREEIQEVRSKSDPIMLLKDRMVNSNLASVEELKEIDVEVRKEIEDAAQFATADPEPPLEELGYHIYSSDPPFEVRGANQWIKFKSVS

SEQ ID NO: 69 - protein, 359 aa, Homo sapiens
MAAVSGLVRRPLREVSGLLKRRFHWTAPAALQVTVRDAINQGMDEELERDEKVFLLGEEVAQYDGAYKVSRGLWKKYGDKRIIDTPISEMGFAGIAVGAAMAGLRPICEFMTFNFSMQAIDQVINSAAKTYYMSGGLQPVPIVFRGPNGASAGVAAQHSQCFAAWYGHCPGLKVVSPWNSEDAKGLIKSAIRDNNPVVVLENELMYGVPFEFPPEAQSKDFLIPIGKAKIERQGTHITVVSHSRPVGHCLEAAAVLSKEGVECEVINMRTIRPMDMETIEASVMKTNHLVTVEGGWPQFGVGAEICARIMEGPAFNFLDAPAVRVTGADVPMPYAKILEDNSIPQVKDIIFAIKKTLNI

SEQ ID NO: 70 - protein, 388 aa, Homo sapiens
MLAAFISRVLRRVAQKSARRVLVASRNSSNDATFEIKKCDLYLLEEGPPVTTVLTRAEGLKYYRMMLTVRRMELKADQLYKQKFIRGFCHLCDGQEACCVGLEAGINPSDHVITSYRAHGVCYTRGLSVRSILAELTGRRGGCAKGKGGSMHMYTKNFYGGNGIVGAQGPLGAGIALACKYKGNDEICLTLYGDGAANQGQIAEAFNMAALWKLPCVFICENNLYGMGTSTERAAASPDYYKRGNFIPGLKVDGMDVLCVREATKFAANYCRSGKGPILMELQTYRYHGHSMSDPGVSYRTREEIQEVRSKRDPIIILQDRMVNSKLATVEELKEIGAEVRKEIDDAAQFATTDPEPHLEELGHHIYSSDSSFEVRGANPWIKFKSVS

SEQ ID NO: 71 - protein, 445 aa, Homo sapiens
MAVAIAAARVWRLNRGLSQAALLLLRQPGARGLARSHPPRQQQQFSSLDDKPQFPGASAEFIDKLEFIQPNVISGIPIYRVMDRQGQIINPSEDPHLPKEKVLKLYKSMTLLNTMDRILYESQRQGRISFYMTNYGEEGTHVGSAAALDNTDLVFGQYREAGVLMYRDYPLELFMAQCYGNISDLGKGRQMPVHYGCKERHFVTISSPLATQIPQAVGAAYAAKRANANRVVICYFGEGAASEGDAHAGFNFAATLECPIIFFCRNNGYAISTPTSEQYRGDGIAARGPGYGIMSIRVDGNDVFAVYNATKEARRRAVAENQPFLIEAMTYRIGHHSTSDDSSAYRSVDEVNYWDKQDHPISRLRHYLLSQGWWDEEQEKAWRKQSRRKVMEAFEQAERKPKPNPNLLFSDVYQEMPAQLRKQQESLARHLQTYGEHYPLDHFDK

SEQ ID NO: 72 - protein, 338 aa, Mus musculus
MLSALARPAGAALRRSFSTSAQNNAKVAVLGASGGIGQPLSLLLKNSPLVSRLTLYDIAHTPGVAADLSHIETRANVKGYLGPEQLPDCLKGCDVVVIPAGVPRKPGMTRDDLFNTNATIVATLTAACAQHCPEAMVCIIANPVNSTIPITAEVFKKHGVYNPNKIFGVTTLDIVRANTFVAELKGLDPARVNVPVIGGHAGKTIIPLISQCTPKVDFPQDQLATLTGRIQEAGTEVVKAKAGAGSATLSMAYAGARFVFSLVDAMNGLEGVVECSFVQSKETECTYFSTPLLLGKKGLEKNLGIGKITPFEEKMIAEAIPELKASIKKGEDFVKNMK

SEQ ID NO: 73 - protein, 222 aa, Homo sapiens [sequence omitted]

SEQ ID NO: 74 - protein, 290 aa, Homo sapiens
MAALRVLLSCARGPLRPPVRCPAWRPFASGANFEYIIAEKRGKNNTVGLIQLNRPKALNALCDGLIDELNQALKIFEEDPAVGAIVLTGGDKAFAAGADIKEMQNLSFQDCYSSKFLKHWDHLTQVKKPVIAAVNGYAFGGGCELAMMCDIIYAGEKAQFAQPEILIGTIPGAGGTQRLTRAVGKSLAMEMVLTGDRISAQDAKQAGLVSKICPVETLVEEAIQCAEKIASNSKIVVAMAKESVNAAFEMTLTEGSKLEKKLFYSTFATDDRKEGMTAFVEKRKANFKDQ

SEQ ID NO: 75 - protein, 500 aa, Homo sapiens
MASMLLAQRLACSFQHTYRLLVPGSRHISQAAAKVDVEFDYDGPLMKTEVPGPRSQELMKQLNIIQNAEAVHFFCNYEESRGNYLVDVDGNRMLDLYSQISSVPIGYSHPALLKLIQQPQNASMFVNRPALGILPPENFVEKLRQSLLSVAPKGMSQLITMACGSCSNENALKTIFMWYRSKERGQRGFSKEELETCMINQAPGCPDYSILSFMGAFHGRTMGCLATTHSKAIHKIDIPSFDWPIAPFPRLKYPLEEFVKENQQEEAGCLEEVEDLIVKYRKKKKTVAGIIVEPIQSEGGDNHASDDFFRKLRDIARKHCCAFLVDEVQTGGGCTGKFWAHEHWGLDDPADVMTFSKKMMTGGFFLKEEFRPNAPYRIFNTWLGDPSKNLLLAEVINIIKREDLLNNAAHAGKALLTGLLDLQARYPQFISRVRGRGTFCSFDTPDDSIRNKLILIARNKGVVLGGCGDKSIRFRPTLVFRDHHAHLFLNIFSDILADFK

SEQ ID NO: 76 - protein, 438 aa, Homo sapiens
MALRGVSVRLLSRGPGLHVLRTWVSSAAQTEKGGRTQSQLAKSSRPEFDWQDPLVLEEQLTTDEILIRDTFRTYCQERLMPRILLANRNEVFHREIISEMGELGVLGPTIKGYGCAGVSSVAYGLLARELERVDSGYRSAMSVQSSLVMHPIYAYGSEEQRQKYLPQLAKGELLGCFGLTEPNSGSDPSSMETRAHYNSSNKSYTLNGTKTWITNSPMADLFVVWARCEDGCIRGFLLEKGMRGLSAPRIQGKFSLRASATGMIIMDGVEVPEENVLPGASSLGGPFGCLNNARYGIAWGVLGASEFCLHTARQYALDRMQFGVPLARNQLIQKKLADMLTEITLGLHACLQLGRLKDQDKAAPEMVSLLKRNNCGKALDIARQARDMLGGNGISDEYHVIRHAMNLEAVNTYEGTHDIHALILGRAITGIQAFTASK

SEQ ID NO: 77 - protein, 438 aa, Mus musculus
MSLRGVSAQLLSRRSGLRFPRFPRTWSSAAAHTEKTQIRPAKSSRPVFDWKDPLILEEQLTADEKLIRDTFRNYWQERLMSQILLANRNEVFHRDIVYEMGELGVLGPTIKGYGCAGVSSVAYGLLTRELERVDSGYRSMMSVQSSLVMHPIYTYGSEEQRQKYLPRLAKGELLGCFGLTEPNHGSDPGGMETRARHNPSNQSYTLSGTKTWITNSPVADLFIVWARCEDNCIPGFILEKGMRGSSAPRIEGKFSLRASATGMIIMDSVEVPEENVLPNVSSLAGPFGCLNTARYGITWGVLGAAEFCLHTARQYALDRIQFGVPLARNQLVQKKLADMLTEITLGLHACLQLGRLKDQDKATPEMVSMLKRNNCGKALDIARQARDILGGNGISDEYHVIRHAMNLEAVNTYEGTHDIHALILGRAITGIQAFTVGK

SEQ ID NO: 78 - protein, 298 aa, Caenorhabditis elegans
MFTAKCAMQNIRNVAIVGSGQMGSGIAQVTASSGFNVMLADVNKKALDRAMKAISQSVTHLSKKQKGTDKEKSDFVTLTMSRIKTCNNVSTAVADADLIIEAAIENIDLKRGIFAQIEQSCKKDSILTTNTSSFLLEDVAKGLQDKTRFGGLHFFNPVPVMKLLEVIRSDDTSDETYATLIKFGTAVGKTTVACKDSPGFIVNRLLIPYFFEAARMYERGDASMTDIDEAMKLGAGHPMGPFELADYIGLDTVKFVMDGWAAKYPEVQLFEASPLVDKLVAEGKLGRKTGDGFYSYKK

SEQ ID NO: 79 - protein, 309 aa, Caenorhabditis elegans
MLSSTCTAAVRGLSTTAQLSKINNVTIIGAGLMGSGIAQVSANAKLNVTVVDSNQSALEKAQQGIANSLKRVAKKKHADDAAAQTALVSSVLDRIKMSTNVSDSVKDADLVIEAIVENIDIKRKLFAEVEVAAKPTTLITTNTSSLRLADIGLNLKDKSRFGGLHFFNPVPMMKLLEVVRHTETSDATFNQLVDYGKTVGKTTVACKDTPGFIVNRLLVPYMFEALRLYERGDASMEDIDVAMKLGAGYPMGPFELSDYVGLDTCKFIMDGWHAQYPEEVAFTPSPLLNSLVDSGKNGRKSGEGFYKYK

SEQ ID NO: 80 - protein, 573 aa, Mus musculus
MLRLPTVLRQMRPVSRALAPHLTRAYAKDVKFGADARALMLQGVDLLADAVAVTMGPKGRTVIIEQSWGSPKVTKDGVTVAKSIDLKDKYKNIGAKLVQDVANNTNEEAGDGTTTATVLARSIAKEGFEKISKGANPVEIRRGVMLAVDAVIAELKKQSKPVTTPEEIAQVATISANGDKDIGNIISDAMKKVGRKGVITVKDGKTLNDELEIIEGMKFDRGYISPYFINTSKGQKCEFQDAYVLLSEKKISSVQSIVPALEIANAHRKPLVIIAEDVDGEALSTLVLNRLKVGLQVVAVKAPGFGDNRKNQLKDMAIATGGAVFGEEGLNLNLEDVQAHDLGKVGEVIVTKDDAMLLKGKGDEAHIEKRIQEITEQLDITTSEYEKEKLNERLAKLSDGVAVLKVGGTSDVEVNEKKDRVTDALNATRAAVEEGIVLGGGCALLRCIPALDSLKPANEDQKIGIEIIKRALKIPAMTIAKNAGVEGSLIVEKILQSSSEVGYDAMLGDFVNMVEKGIIDPTKVVRTALLDAAGVASLLTTAEAVVTEIPKEEKDPGMGAMGGMGGGMGGGMF

SEQ ID NO: 81 - protein, 325 aa, Mus musculus
MASVRKAFPRRLVGLTSLRAVSTSSMGTLPKQVKIVEVGPRDGLQNEKSIVPTPVKIRLIDMLSEAGLPVIEATSFVSPNWVPQMADHSDVLKGIQKFPGINYPVLTPNMKGFEEAVAAGAKEVSVFGAVSELFTRKNANCSIEESFQRFAGVMQAAQAASISVRGYVSCALGCPYEGKVSPAKVAEVAKKLYSMGCYEISLGDTIGVGTPGLMKDMLTAVMHEVPVTALGVHCHDTIGQALANTLVALQMGVSVVDSSVAGLGGCPYAKGASGNLATEDLVYMLNGLGIHTGVNLQKLLEAGDFICQALNRKTSSKVAQATCKL

SEQ ID NO: 82 - protein, 134 aa, Mus musculus
VVNCSTPGNFFHVLRRQILLPFRKPLIVFTPKSLLRHPEARTSFDFTEMLPGTHFQRVIPENGPAAQDPHKVKRLLFCTGKVYYDLTRERKARNMEEEVAITRIEQFTLSPFPFDLLLKEAQKYPNAELAWCQE

SEQ ID NO: 83 - protein, 519 aa, Mus musculus
MLRAALTTVRRGPRLSRLLSAAATSAVPAPNHQPEVFCNQIFINNEWHDAVSRKTFPTVNPSTGEVICQVAEGNKEDVDKAVKAARAAFQLGSPWRRMDASDRGRLLYRLADLIERDRTYLAALETLDNGKPYVISYLVDLDMVLKCLRYYAGWADKYHGKTIPIDGDFFSYTRHEPVGVCGQIIPWNFPLLMQAWKLGPALATGNVVVMKVAEQTPLTALYVANLIKEAGFPPGVVNIVPGFGPTAGAAIASHEGVDKVAFTGSTEVGHLIQVAAGSSNLKRVTLELGGKSPNIIMSDADMDWAVEQAHFALFFNQGQCCCAGSRTFVQENVYDEFVERSVARAKSRVVGNPFDSRTEQGPQVDETQFKKILGYIKSGQQEGAKLLCGGGAAADRGYFIQPTVFGDVKDGMTIAKEEIFGPVMQILKFKTIEEVVGRANDSKYGLAAAVFTKDLDKANYLSQALQAGTVWINCYDVFGAQSPFGGYKMSGSGRELGEYGLQAYTEVKTVTVKVPQKNS

SEQ ID NO: 84 - protein, 412 aa, Mus musculus
MAAALLARARGPLRRALGVRDWRRLHTVYQSVELPETHQMLRQTCRDFAEKELVPIAAQLDREHLFPTAQVKKMGELGLLAMDVPEELSGAGLGYLAYSIALEEISRACASTGVIMSVNNSLYLGPILKFGSAQQKQQWITPFTNGDKIGCFALSEPGNGSDAGAASTTAREEGDSWVLNGTKAWITNSWEASATVVFASTDRSRQNKGISAFLVPMPTPGLTLGKKEDKLGIRASSTANLIFEDCRIPKENLLGEPGMGFKIAMQTLDMGRIGIASQALGIAQASLDCAVKYAENRNAFGAPLTKLQNIQFKLADMALALESARLLTWRAAMLKDNKKPFTKESAMRKLAASEAATAISHQAIQILGSMGYVTEMPAERYYRDARITEIYEGTSEIQRLVIAGHLLRSYRS

SEQ ID NO: 85 - protein, 435 aa, Homo sapiens
MAAGFGRCCRVLRSISRFHWRSQHTKANRQREPGLGFSFEFTEQQFTKEFQATARKFAREEIIPVAAEYDKTGEYPVPLIRRAWELGLMNTHIPENCGGLGLGTFDFTACLISEELAYGCTGVQTAIEGNSLGQMPIIIAGNDQQKKKYLGRMTEEPLMCAYCVTEPFTGAGSDVAGIKTKAEKKGDEYIINGQKMWITNGGKANWYFLLARSDPDPKAPANKAFTGFIVFTEADTPGIQIGRKELNMGQRCSDTRGIVFEDVKVPKENVLIGDGAGFKVAMGAFDKTRFTPVVAAGAVGLAQRALDEATKYALERKTFGKLLVEHQAISFMLAEMAMKVELARMSYQRAFTAWEVDSGRRNTYYASIAKAFAGDIANQLATDAVQILGGNGFNTEYPVEKLMRDAKIYQIFTYEGTSQIQRLIVAREHIDKYKN

SEQ ID NO: 86 - protein, 450 aa, Homo sapiens
MRLARLLRGAALAGPGPGLRAAGFSRSFSSDSGSSPASERGVPGQFTVDFYARFSPSPLSMKQFLDFGSVNACEKTSFMFLRQELPVRLANIMKEISLLPDNLLRTFTPSVQLVQSWYIQSLQELLDFKDKSAEDAKAIYDFTDTVIRIRNRHNDVIPTMAQGVIEYFTKESFGVDPVTSQNVQYFLDRFYMSRISIRMLLNQHSLLFGGKGKGSPSHRKHIGSINPNFTCNVLEVIKDGYENARRLCDLYYINSPELELEELNAKSPGQPIQVVYVPSHLYHMVFELFFTKNAMRATMEHHANRGVYPPIQVHVTLGNEDLTVKMSDRGGGVPLRKIDRLFNYMYSTAPFTRPRVETSRAVPLAGFGYGLPISRLYAQYFQGDLKLYSLEGYGTDAVIYIKALSTDSIERFTLPVYNKAAWKHYNTNHEADDWCVPSREPKDMTTFRSA

SEQ ID NO: 87 - protein, 222 aa, Homo sapiens [sequence omitted]

SEQ ID NO: 88 - protein, 421 aa, Homo sapiens
MRWVWALLKNASLAGAPKYIEHFSKFSPSPLSMKQFLDFGSSNACFTEKTSFTFLRQELPVRLANIMKEINLLPDRVLSTPTVQLVQSWYVQSLLDIMEFLDKDPEFTDHRTLSQFTDALVTIRNRHNDVVPTMAQGVLEYKDTYGDDPVSNQNIQYFLDRFYLSRIFTSIRMLINQHTLIFDGSTNPAHPKHIGSIDPNCNVSEVVKDAYDMAKLLCDKYYMASPDLFTEIQEINAANSKQPIHMVYVPSHLYHMLFELFKNAMRATVESHESSLILPPIKVMVALGEFTEDLSIKMSDRGGGVPLRKIERLFSYMYSTAPTPQPGTGGTPLAGFGYGLPISRLYAKYFFTQGDLQLFSMEGFGTDAVIYLKALSTDSVERLPVYNKSAWRHYQTIQEAGDWCVPSTEPKFTNTSTYRVT

SEQ ID NO: 89 - protein, 420 aa, Homo sapiens
MRLFRWLLKQPVPKQIERYSRFSPSPLSIKQFLDFGRDNACEKTSFTYMFLRKELPVRLANTMREVNLLPDNLLNRPSVGLVQSWYMQSFLELLEYENLSPEDPQVPTLDNFLQVLIKVRNRHNDVVPTMAQGVIEYKEKFGFDPFISTNIQYFLDRFYTNRISFRMFTLINQHTLLFGGDTNPVHPKHIGSIDPTCNVADVVKDAYETAKMLCEQYYLVAPELEVEEFTFNAKAPDKPIQVVYVPSHLFHMLFELFKNSMRATVELYEDRKEGYPAVKTLVTLGKEDLFTSIKISDLGGGVPLRKIDRLFNYMYSTAPRPSLEPTRAAPLAGFGYGLPISRLYARYFQGFTDLKLYSMEGVGTDAVIYLKALSSESFERLPVFNKSAWRHYKTTPEADDWSNPSSEPRDAFTSKYKAKQ

SEQ ID NO: 90 - protein, 789 aa, Homo sapiens [sequence omitted]

SEQ ID NO: 91 - protein, 488 aa, homo sapiens
MTILTYPFKNLPTASKWALRFSIRPLSCSSQLRAAPAVQTKTKKTFTLAKPNIRNVVVVDGVRTPFLLSGTSYKDLMPHDLARAALTGLLHRTSVPKEVVDYIIFGFTTVIQEVKTSNVAREAALGAGFSDKTPAHTVTMACISANQAMTTGVGLIASGQCDVIVAGFTGVELMSDVPIRHSRKMRKLMLDLNKAKSMGQRLSLISKFRFNFLAPELPAVSEFSTSETFTMGHSADRLAAAFAVSRLEQDEYALRSHSLAKKAQDEGLLSDVVPFKVPGKDTVTKDNGIFTRPSSLEQMAKLKPAFIKPYGTVTAANSSFLTDGASAMLIMAEEKALAMGYKPKAYLRDFMYVSQDPKDQLLLGPTYATPKVLEKAGLTMNDIDAFEFHEAFSGQILANFKAMDSDWFAFTENYMGRKTKVGLPPLEKFNNWGGSLSLGHPFGATGCRLVMAAANRLRKEGGQYGLVAACFTAAGGQGHAMIVEAYPK

SEQ ID NO: 92 - protein, 1218 aa, Homo sapiens [sequence omitted]

SEQ ID NO: 93 - protein, 324 aa, Homo sapiens
MAFVTRQFMRSVSSSSTASASAKKIIVKHVTVIGGGLMGAGIAQVFTAAATGHTVVLVDQTEDILAKSKKGIEESLRKVAKKKFAENPKAGDEFVEKTLSTIATSFTTDAASVVHSTDLVVEAIVENLKVKNELFKRLDKFAAEHTIFASNTSSLHITSIANATTRQFTDRFAGLHFFNPVPVMKLVEVIKTPMTSQKTFESLVDFSKALGKHPVSCKDTPGFIVNRLFTLVPYLMEAIRLYERGDASKEDIDTAMKLGAGYPMGPFELLDYVGLDTTKFIVDGWHEMDFTAENPLHQPSPSLNKLVAENKFGKKTGEGFYKYK

SEQ ID NO: 94 - protein, 229 aa, Homo sapiens
MASKLLRAVILGPPGSGKGTVCQRIAQNFGLQHLSSGHFLRENIKFTASTEVEGMAKQYIEKSLLVPDHVITRLMMSELENRRGQHWLLDGFPRTLGQAEALDKICFTEVDLVISLNIPFETLKDRLSRRWIHPPSGRVYNLDFNPPHVHGIDDVTGEPLVQQEDDKFTPEAVAARLRQYKDVAKPVIELYKSRGVLHQFSGTETNKIWPYVYTLFSNKITPIQSKEAY

SEQ ID NO: 95 - protein, 866 aa, Homo sapiens [sequence omitted]

SEQ ID NO: 96 - protein, 338 aa, Homo sapiens [sequence omitted]

SEQ ID NO: 97 - protein, 505 aa, Homo sapiens
MAAAAARVVLSSAARRRLWGFSESLLIRGAAGRSLYFGENRLRSTFTQAATQVVLNVPETRVTCLESGLRVASEDSGLSTCTVGLWIDAGSRYENEKNNGTAHFLEFTHMAFKGTKKRSQLDLELEIENMGAHLNAYTSREQTVYYAKAFSKDLPRAVEILADIIQNFTSTLGEAEIERERGVILREMQEVETNLQEVVFDYLHATAYQNTALGRTILGPTENIKSISFTRKDLVDYITTHYKGPRIVLAAAGGVSHDELLDLAKFHFGDSLCTHKGEIPALPPCKFTGFTSEIRVRDDKMPLAHLAIAVEAVGWAHPDTICLMVANTLIGNWDRSFGGGMNLSSKLAQLFTTCHGNLCHSFQSFNTSYTDTGLWGLYMVCESSTVADMLHVVQKEWMRLCTSVTESEVARFTARNLLKTNMLLQLDGSTPICEDIGRQMLCYNRRIPIPELEARIDAVNAETIREVCTKYIFTYNRSPAIAAVGPIKQLPDFKQIRSNMCWLRD

SEQ ID NO: 98 - protein, 130 aa, Mus musculus
VVNCSTPGNFFHVLRRQILLPFRKPLIVFTPKSLLRHPEARTSFDEMLPGTHFQRVIPENGPAAQDPHKVKRLLFCTGKVYYDLTRERKARNMEEEVAITRIEQLSPFPFDLLLKEAQKYPNAELAWCQE

SEQ ID NO: 99 - protein, 397 aa, Caenorhabditis elegans
MSLFARQLQSLTASGIRTQQVRLASTEVSFHTKPCKLHKLDNGPNTSVTLNREDALKYYRDMQVIRRMESAAGNLYKEKKIRGFCHLYSGQEACAVGMKAAMTEGDAVITAYRCHGWTWLLGATVTEVLAELTGRVAGNVHGKGGSMHMYTKNFYGGNGIVGAQQPLGAGVALAMKYREQKNVCVTLYGDGAANQGQLFEATNMAKLWDLPVLFVCENNGFGMGTTAERSSASTEYYTRGDYVPGIWVDGMDILAVREATKWAKEYCDSGKGPLMMEMATYRYHGHSMSDPGTSYRTREEIQEVRKTRDPITGFKDRIITSSLATEEELKAIDKEVRKEVDEALKIATSDGVLPPEALYADIYHNTPAQEIRGATIDETIVQPFKTSADVLKSIGRA

SEQ ID NO: 100 - protein, 354 aa, Homo sapiens
MLFNLRILLNNAAFRNGHNFMVRNFRCGQPLQNKVQLKGRDLLTLKNFTGEEIKYMLWLSADLKFRIKQKGEYLPLLQGKSLGMIFEKRSTRTRLSTETGFALLGGHPCFLTTQDIHLGVNESLTDTARVLSSMADAVLARVYKQSDLDTLAKEASIPIINGLSDLYHPIQILADYLTLQEHYSSLKGLTLSWIGDGNNILHSIMMSAAKFGMHLQAATPKGYEPDASVTKLAEQYAKENGTKLLLTNDPLEAAHGGNVLITDTWISMGQEEEKKKRLQAFQGYQVTMKTAKVAASDWTFLHCLPRKPEEVDDEVFYSPRSLVFPEAENRKWTIMAVMVSLLTDYSPQLQKPKF

SEQ ID NO: 101 - protein, 366 aa, Mus musculus
MLSNLRILLNNAALRKGHTSVVRHFWCGKPVQSQVQLKGRDLLTLFTKNFTGEEIQYMLWLSADLKFRIKQKGEYLPLLQGKSLGMIFEKRSTRTRLSTETGFALLFTGGHPSFLTTQDIHLGVNESLTDTARVLSSMTDAVLARVYKQSDLDTLAKEASIPIVNGLFTSDLYHPIQILADYLTLQEHYGSLKGLTLSWIRDGNNILHSIMMSAAKFGMHLQAATPKGFTYEPDPNIVKLAEQYAKENGTKLSMTNDPLEAARGGNVLITDTWISMGQEDEKKKRLQAFFTQGYQVTMKTAKVAASDWTFLHCLPRKPEEVDDEVFYSPRSLVFPEAENRKWTIMAVMVSFTLLTDYSPVLQKPKF

SEQ ID NO: 102 - protein, 392 aa, Homo sapiens
MASHKLLVTPPKALLKPLSIPNQLLLGPGPSNLPPRIMAAGGLQMIGSMSKDMYQIMDEIKEGIQYVFQTRNPLTLVISGSGHCALEAALVNVLEPGDSFLVGANGIWGQRAVDIGERIGARVHPMTKDPGGHYTLQEVEEGLAQHKPVLLFLTHGESSTGVLQPLDGFGELCHRYKCLLLVDSVASLGGTPLYMDRQGIDILYSGSQKALNAPPGTSLISFSDKAKKKMYSRKTKPFSFYLDIKWLANFWGCDDQPRMYHHTIPVISLYSLRESLALIAEQGLENSWRQHREAAAYLHGRLQALGLQLFVKDPALRLPTVTTVAVPAGYDWRDIVSYVIDHFDIEIMGGLGPSTGKVLRIGLLGCNATRENVDRVTEALRAALQHCPKKKL

SEQ ID NO: 103 - protein, 563 aa, Homo sapiens
MLLPAPALRRALLSRPWTGAGLRWKHTSSLKVANEPVLAFTQGSPERDALQKALKDLKGRMEAIPCVVGDEEVWTSDVQYQVSPFNHGHKVAKFCYADKSLLNKAIEAALAARKEWDLKPIADRAQIFLKAADMLSGPRRAEILAKTMVGQGKTVIQAEIDAAAELIDFFRFNAKYAVELEGQQPISVPPSTNSTVYRGLEGFVAAISPFNFTAIGGNLAGAPALMGNVVLWKPSDTAMLASYAVYRILREAGLPPNIIQFVPADGPLFGDTVTSSEHLCGINFTGSVPTFKHLWKQVAQNLDRFHTFPRLAGECGGKNFHFVHRSADVESVVSGTLRSAFEYGGQKCSACSRLYVPHSLWPQIKGRLLEEHSRIKVGDPAEDFGTFFSAVIDAKSFARIKKWLEHARSSPSLTILAGGKCDDSVGYFVEPCIVESKDPQEPIMKEEIFGPVLSVYVYPDDKYKETLQLVDSTTSYGLTGAVFSQDKDVVQEATKVLRNAAGNFYINDKSTGSIVGQQPFGGARASGTNDKPGGPHYILRWTSPQVIKETHKPLGDWSYAYMQ

SEQ ID NO: 104 - protein, 398 aa, Saccharomyces cerevisiae
MKLKLLNMILSMMNKTNNNNNIIINNTLDSLMNKKLLLKNMLLDMNNKKMNNMKRMLNNNNMNPAGANPVVHRIGPAGNINNKLQHLNNMNNWNTQIYNYNKNMEIMNTMNDKLINKLLYKMMTLKLNNMNINKIIMSKTINQHSLNKLNIKFYYYNNDINNNNNNNNNNYYMNMMNKLMNIMNNNMNNNLCNILSYYYKKKVTIEPIKLSYIYLNSDIFSKYISLNDMDKYNNGILTNYQRMLNNIMPKLNDHNISMNYINNINNINNNKYNNMINLLNNNNNINNNNNYNNNNNNYIGNINNIYNNMTIDNIPMDILMYKYLVGWSIKFKGRLSNNNGRTSTTNLLNGTFNNKKYLWSNINNNYKLNYIPSNHNLYNNSNINKNGKYNIKVKLNFI

SEQ ID NO: 105 - protein, 525 aa, Homo sapiens
MAAVVLAATRLLRGSGSWGCSRLRFGPPAYRRFSSGGAYPNIPLSSPLPGVPKPVFATVDGQEKFETKVTTLDNGLRVASQNKFGQFCTVGILINSGSRYEAKYLSGIAHFLEKLAFSSTARFDSKDEILLTLEKHGGICDCQTSRDTTMYAVSADSKGLDTVVALLADVVLQPRLTDEEVEMTRMAVQFELEDLNLRPDPEPLLTEMIHEAAYRENTVGLHRFCPTENVAKINREVLHSYLRNYYTPDRMVLAGVGVEHEHLVDCARKYLLGVQPAWGSAEAVDIDRSVAQYTGGIAKLERDMSNVSLGPTPIPELTHIMVGLESCSFLEEDFIPFAVLNMMMGGGGSFSAGGPGKGMFSRLYLNVLNRHHWMYNATSYHHSYEDTGLLCIHASADPRQVREMVEIITKEFILMGGTVDTVELERAKTQLTSMLMMNLESRPVIFEDVGRQVLATRSRKLPHELCTLIRNVKPEDVKRVASKMLRGKPAVAALGDLTDLPTYEHIQTALSSKDGRLPRTYRLFR

SEQ ID NO: 106 - protein, 411 aa, Homo sapiens
MKAARFVLRSAGSLNGAGLVPREVEHFSRYSPSPLSMKQLLDFGSENACERTSFAFLRQELPVRLANILKEIDILPTQLVNTSSVQLVKSWYIQSLMDLVEFHEKSPDDQKALSDFVDTLIKVRNRHHNVVPTMAQGIIEYKDACTVDPVTNQNLQYFLDRFYMNRISTRMLMNQHILIFSDSQTGNPSHIGSIDPNCDVVAVVQDAFECSRMLCDQYYLSSPELKLTQVNGKFPDQPIHIVYVPSHLHHMLFELFKNAMRATVEHQENQPSLTPIEVIVVLGKEDLTIKISDRGGGVPLRIIDRLFSYTYSTAPTPVMDNSRNAPLAGFGYGLPISRLYAKYFQGDLNLYSLSGYGTDAIIYLKALSSESIEKLPVFNKSAFKHYQMSSEADDWCIPSREPKNLAKEVAM

SEQ ID NO: 107 - protein, 296 aa, Homo sapiens [sequence omitted]

SEQ ID NO: 108 - protein, 430 aa, Mus musculus
MALLHSSRILSGMAAAFHPGLAAAASARASSWWTHVEMGPPDPILGVTEAFKRDTNSKKMNLGVGAYRDDNGKPYVLPSVRKAEAQIAAKNLDKEYLPIGGLAEFCKASAELALGENNEVLKSGRFVTVQTISGTGALRVGASFLQRFFKFSRDVFLPKPSWGNHTPIFRDAGMQLQGYRYYDPKTCGFDFSGALEDISKIPEQSVLLLHACAHNPTGVDPRPEQWKEIASVVKKKNLFAFFDMAYQGFASGDGDKDAWAVRHFIEQGINVCLCQSYAKNMGLYGERVGAFTVVCKDAEEAKRVESQLKILIRPLYSNPPLNGARIAATILTSPDLRKQWLQEVKGMADRIISMRTQLVSNLKKEGSSHNWQHITDQIGMFCFTGLKPEQVERLTKEFSVYMTKDGRISVAGVTSGNVGYLAHAIHQVTK

SEQ ID NO: 109 - protein, 748 aa, Mus musculus
MLRAKNQLFLLSPHYLKQLNIPSASRWKRLLHQQQPLHPEWAVLAKKQLKGKNPEDLIWHTPEGISIKPLYSRADTLDLPEELPGVKPFTRGPYPTMYTYRPWTIRQYAGFSTVEESNKFYKDNIKAGQQGLSVAFDLATHRGYDSDNPRVRGDVGMAGVAIDTVEDTKILFDGIPLEKMSVSMTMNGAVIPVLATFIVTGEEQGVPKEKLTGTIQNDILKEFMVRNTYIFPPEPSMKIIADIFQYTAQHMPKFNPISISGYHMQEAGTDAILELAYTIADGLEYCRTGLQAGLTIDEFAPRLSFFWGIGMNFYMEIAKMRAGRRLWAHLIEKMFQPKNSKSLLLRAHCQTSGWSLTEQDPYNNIVRTAIEAMAAVFGGTQSLHSNSFDEALGLPTVKSARIARNTRIIIQEESGIPKVADPWGGSYMMESLTNDVYEAALKLIYEVEEMGGMAKAVAEGIPKLRIEECAARRQARIDSGSEVIVGVNKYHLEKEDSVHLLAIDIISLRKKQIEKLKKIKSSRDQALAEQCLSALTQCAASGDGNILALAVDAARARCTVPEITDAFKKVFGEHKANDRMVSGAYRQEFGESKEITSAIKRVNKFMEREGRRLGLLVAKMGKDGHDRGAKVIATGFADLGFDVDIGPLFQTPREVAHDAVDADVHAVGVSTHAAGHKTLVPELIKELTALGRPDILVMCGGVIPPQDYEFLYEVGVSNVFGPGTRIPRAAVQVLDDIEKCLAEKQQSV

SEQ ID NO: 110 - protein, 375 aa, Neurospora crassa
MAPLTAAMRRTPRIIVSNAFGFQRRAISDVTITRTGKPIIRNQGGRSSLGGHTATVFGATGQLGRYIVNRLARQGCTVVIPFRDEYNKRHLKVTGDLGKVVMIEFDLRNTQSIEESVRHSDVVYNLIGRDYPTKNFSFEDVHIEGAERIAEAVAKYDVDRFIHVSSYNADPNSECEFFATKARGEQVVRSIFPETTIVRPAPMFGFEDRLLHKLASVKNILTSNGMQEKYNPVHVIDVGQALEQMLWDDNTASETFELYGPKTYTTAEISEMVDREIYKRRRHVNVPKKILKPIAGVLNKALWWPIMSADEIEREFHDQVIDPEAKTFKDLGIEPADIANFTYHYLQSYRSNAYYDLPPATEKERREDREYIHML

SEQ ID NO: 111 - protein, 111 aa, Caenorhabditis elegans
MSDIPAGDYEKGKKVYKQRCLQCHVVDSTATKTGPTLHGVIGRTSGTVSGFDYSAANKNKGVVWTKETLFEYLLNPKKYIPGTKMVFAGLKKADERADLIKYIEVESAKSL

SEQ ID NO: 112 - protein, 558 aa, Mus musculus
MYRRLGEALLLSRAGPAALGSAAADSAALLGWARGQPSAAPQPGLTPVARRHYSEAAADREDDPNFFKMVEGFFDRGASIVEDKLVEDLKTRESEEQKRNRVRGILRIIKPCNHVLSLSFPIRRDDGSWEVIEGYRAQHSQHRTPCKGGIRYSTDVSVDEVKALASLMTYKCAVVDVPFGGAKAGVKINPKNYTDNELEKITRRFTMELAKKGFIGPGIDVPAPDMSTGEREMSWIADTYASTIGHYDINAHACVTGKPISQGGIHGRISATGRGVFHGIENFINEASYMSILGMTPGFGDKTFVVQGFGNVGLHSMRYLHRFGAKCVGVGESDGSIWNPDGIDPKELEDFKLQHGSILGFPKAKVYEGSILEADCDILIPAASEKQLTKSNAPRVKAKIIAEGANGPTTPEADKIFLERNIMVIPDLYLNAGGVTVSYFEWLKNLNHVSYGRLTFKYERDSNYHLLMSVQESLERKFGKHGGTIPVVPTAEFQDRISGASEKDIVHSGLAYTMERSARQIMRTAMKYNLGLDLRTAAYVNAIEKVFKVYNEAGVTFT

SEQ ID NO: 113 - protein, 390 aa, Mus musculus
MRKMLAAVSRVLAGSAQKPASRVLVASRNFANDATFEIKKCDLHRLEEGPPVTTVLTREDGLKYYRMMQTVRRMELKADQLYKQKIIRGFCHLCDGQEACCVGLEAGINPTDHLITAYRAHGFTFTRGLPVRAILAELTGRRGGCAKGKGGSMHMYAKNFYGGNGIVGAQVPLGAGIALACKYNGKDEVCLTLYGDGAANQGQIFEAYNMAALWKLPCIFICENNRYGMGTSVERAAASTDYYKRGDFIPGLRVDGMDILCVREATKFAAAYCRSGKGPILMELQTYRYHGHSMSDPGVSYRTREEIQEVRSKSDPIMLLKDRMVNSNLASVEELKEIDVEVRKEIEDAAQFATADPEPPLEELGYHIYSSDPPFEVRGANQWIKFKSVS

SEQ ID NO: 114 - protein, 220 aa, Homo sapiens
PPTPSAPCPATPAGPKGRVFVSPLAKKLAVEKGIDLTQVKGTGPDGRITKKDIDSFVPSKVAPAPAAVVPPTGPGMAPVPTGVFTDIPISNIRRVIAQRLMQSKQTIPHYYLSIDVNMGEVLLVRKELNKILEGRSKISVNDFIIKASALACLKVPEANSSWMDTVIRQNHVVDVSVAVSTPAGLITPIVFNAHIKGVETIANDVVSLATKAREGKLQPH

SEQ ID NO: 115 - protein, 896 aa, Neurospora crassa
MIKFYFTTFHMKFPARLFSTSFTLNNTNIINEKDVKYITKNFLLENSNGFNLIKNIINSDETSEVKQNKIEVELNNIWHTEITDILQKKRSLGLDAIGSSILAKDFHNLIGDIENFINKGRTNKLPGVEYLKPSLIISIVLGKVIPFSLRHSDIFNQPTHSLFAEIGKILKYQSIFELHHRIGLIQNRVEEIKNYTEKKLVSEFNKLTKVLDEYKNTLKNLEELSGESIIKVGLGFTALLSETSEFYSLEEQIIAKNKSIRYIIPKNKLKTLINNITLMDTIELPMIIPPLEWKIDDNEKIIEYGGTILNNKHRIRPLRTKSVENSDANDMTYNKELVDAVNFKSKIPYTINLKILDFITRDEFINRDKKDNVIIYKHIHPDSALLGEYMKDRKNPKISEITTHNSKFLYHSSIISIAKLMKDVKEFYMTVFIDWRGRFYTSSCALNIQGGELARSLLLFKEGQKLNDIGLKALKIYTANAFGLDKRSKEERLDWVEQNLHKIIDIDNYEIWREADEPLLFLACALELKGYNEDPNFISHLPILMDATCNGLQHLSAMVNDFVLAEKVNLLKSTENDNPRDLYSEVIPHIKQEILEASKSYEHTNLERINVERCLVKRGLMTITYGATERGIYDQIVSKFFQKDEWNKTVGLHFVCIDSDIAPKDVVFTQKNILLLSKIIYNSLFKIHPNLNTLMVYFNSIVKVLCELDLPVNWVTPYGLVIQQKYNKFTKYNETTYVASKRYKLVLRKADTTSISKQKQIQAFIPNFVHSMDGSNIVLLINTIRDEGRKINFASIHDCFATHANDTAWLSWYVKQSFIRIYSDSSFLRRFHNYIQLRIQAKYGEDAHFDKDGVLTHVTIDNGTDIPDRIDIPKPLVVNKDNKIYKEILHSEYFIN

SEQ ID NO: 116 - protein, 255 aa, Homo sapiens
MAELRVLVAVKRVIDYAVKIRVKPDRTGVVTDGVKHSMNPFCEIAVEEAVRLKEKKLVKEVIAVSCGPAQCQETIRTALAMGADRGIHVEVPPAEAERLGPLQVARVLAKLAEKEKVDLVLLGKQAIDDDCNQTGQMTAGFLDWPQGTFASQVTLEGDKLKVEREIDGGLETLRLKLPAVVTADLRLNEPRYATLPNIMKAKKKKIEVIKPGDLGVDLTSKLSVISVEDPPQRTAGVKVETTEDLVAKLKEIGRI

SEQ ID NO: 117 - protein, 289 aa, Mus musculus
MALAAARRLLLHAGSRLGRREAVDGARPFANKRVLVETEGPAGVAVMKLRNPPVNSLSLECLTEFTISLEKLENDKSIRGVILTSECPGIFSAGLDLLEMYGRNPAHYAEYWKNVQELWLRLYTSNMILVSAINGASPAGGCLLALCCDYRVMADNPKYTIGLNESLLGIVAPFWFKDMYVNTIGHREADGALQLGTLFSPAEALKVGVVDEVVPEDQVHSKARSVMTKWLAIPDHSRQLTKNMMRKATADNLIKQREADIQNFTSFISKDSIQKSLHMYLEKLKQKKG

SEQ ID NO: 118 - protein, 390 aa, Mus musculus
MAAVAARAGGLLWLRAAGAERRRCGLRCAALVQGFLQPGGEDTAQKRRVAHFTFHPDPESLQYGQTQKMNLFQSITSALDNSLAKDPTAVIFGEDVAFGGVFRCTVGLRDKYGKDRVFNTPLCEQGIVGFGIGIAVTGATAIAEIQFADYIFPAFDQIVNEAAKYRYRSGDLFNCGSLTIRAPWGCVGHGALYHSQSPEAFFAHCPGIKVVIPRSPFQAKGLLLSCIEDKNPCIFFEPKILYRAAVEQVPVEPYKIPLSQAEVIQEGSDVTLVAWGTQVHVIREVASMAQEKLGVSCEVIDLRTIVPWDVDTVCKSVIKTGRLLISHEAPLTGGFASEISSTVQEECFLNLEAPISRVCGYDTPFPHIFEPFYIPDKWKCYDALRKMINY

SEQ ID NO: 119 - protein, 742 aa, Homo sapiens
MLRAKNQLFLLSPHYLRQVKESSGSRLIQQRLLHQQQPLHPEWAALAKKQLKGKNPEDLIWHTPEGISIKPLYSKRDTMDLPEELPGVKPFTRGPYPTMYTFRPWTIRQYAGFSTVEESNKFYKDNIKAGQQGLSVAFDLATHRGYDSDNPRVRGDVGMAGVAIDTVEDTKILFDGIPLEKMSVSMTMNGAVIPVLANFIVTGEEQGVPKEKLTGTIQNDILKEFMVRNTYIFPPDPSMKIIADIFEYTAKHMPKFNSISISGYHMQEAGADAILELAYTLADGLEYSRTGLQAGLTIDEFAPRLSFFWGIGMNFHMEIAKMRAGRRLWAHLIEKMFQPKNSKSLLLRAHCQTSGWSLTEQDPYNNIVRTAIEAMAAVFGGTQSLHTNSFDEALGLPTVKSARIARNTQIIIQEESGIPKVADPWGGSYMMECLTKLINEIEEMGGMAKAVAEGIPKLRIEECAARRQARIDSGSEVIVGVNKYQLEKEDAVEVLATDNTSVRNRQIEGLKKIKSSRDQALAEHCLAALTECAASGDGNILALAVDASRARCTVGEITDALKKVFGEHKANDRMVSGAYRQEYGESKEITSAIKRVHKFMEREGRRPRLLVAKMGQDGHDRGAKVIATGFADLGFDVDIGPLFQTPREVAQQAVDADVHAVGVSTLAAGHKTLVPELIKELNSLGRPDILVMCGGVIPPQDYEFLFEVGVSNVFGPGTRIPKAAVQVLDDIEKCLEKKQQSV

SEQ ID NO: 120 - protein, 288 aa, Caenorhabditis elegans
MMRFSSMLVRNAKLCANVNQMQVAAFSSKAPEMIKIEKVGEKQNVALIKLNRPKALNALCAQLMTELADALEVLDTDKSVGAIVITGSERAFAAGADIKEMTNNEFATTFSGSFLSNWTAVSDVKKPVIAAVNGFALGGGNELAMMCDIIYAGEKARFGQPEINIGTIPGAGGTQRWARAAGKSFAMEVCLTGNHVTAQEAKEHGIVSKIFPADQVVGEAVKLGEKIADQSPLIVQMAKEAVNKAYELTLQEGLHFERRLFHATFATKDRKEGMTAFAEKRKPQWESK

SEQ ID NO: 121 - protein, 469 aa, Neurospora crassa
MAPVMRLGSAALRSSIHLTSRQTAFTAARCYSSKTQTLKERFAELLPENIEKIKALRKEHGSKVVDKVTLDQVYGGARGIKCLVWEGSVLDAEEGIRFRGKTIPECQELLPKAPGGKEPLPEGLFWLLLTGEVPSEQQVRDLSAEWAARSDVPKFIEELIDRCPSDLHPMAQLSLAVTALEHTSSFARAYAKGINKKEYWGYTFEDSMDLIAKLPTIAARIYQNVFKGGKVAAVQKDKDYSFNFANQLGFGDNKDFVELLRLYLTIHTDHEGGNVSAHTTHLVGSALSSPFLSVAAGLNGLAGPLHGLANQEVLNWLTEMKKVIGDDLSDEAITKYLWDTLNAGRVVPGYAHAVLRKTDPRYSAQRKFAQEHLPEDPMFQLVSQVYKIAPKVLTEHGKTKNPYPNVDAHSGVLLQHYGLTEANYYTVLFGVSRAIGVLPQLIIDRAVGAPIERPKSYSTDKWIEICKKL

SEQ ID NO: 122 - protein, 937 aa, Homo sapiens
MLAAAGGRVPTAAGAWLLRGQRTCDASPPWALWGRGPAIGGQWRGFWEASSRGGGAFSGGEDASEGGAEEGAGGAGGSAGAGEGPVITALTPMTIPDVFPHLPLIAITRNPVFPRFIKIIEVKNKKLVELLRRKVRLAQPYVGVFLKRDDSNESDVVESLDEIYHTGTFAQIHEMQDLGDKLRMIVMGHRRVHISRQLEVEPEEPEAENKHKPRRKSKRGKKEAEDELSARHPAELAMEPTPELPAEVLMVEVENVVHEDFQVTEEVKALTAEIVKTIRDIIALNPLYRESVLQMMQAGQRVVDNPIYLSDMGAALTGAESHELQDVLEETNIPKRLYKALSLLKKEFELSKLQQRLGREVEEKIKQTHRKYLLQEQLKIIKKELGLEKDDKDAIEEKFRERLKELVVPKHVMDVVDEELSKLGLLDNHSSEFNVTRNYLDWLTSIPWGKYSNENLDLARAQAVLEEDHYGMEDVKKRILEFIAVSQLRGSTQGKILCFYGPPGVGKTSIARSIARALNREYFRFSVGGMTDVAEIKGHRRTYVGAMPGKIIQCLKKTKTENPLILIDEVDKIGRGYQGDPSSALLELLDPEQNANFLDHYLDVPVDLSKVLFICTANVTDTIPEPLRDRMEMINVSGYVAQEKLAIAERYLVPQARALCGLDESKAKLSSDVLTLLIKQYCRESGVRNLQKQVEKVLRKSAYKIVSGEAESVEVTPENLQDFVGKPVFTVERMYDVTPPGVVMGLAWTAMGGSTLFVETSLRRPQDKDAKGDKDGSLEVTGQLGEVMKESARIAYTFARAFLMQHAPANDYLVTSHIHLHVPEGATPKDGPSAGCTIVTALLSLAMGRPVRQNLAMTGEVSLTGKILPVGGIKEKTIAAKRAGVTCIILPAENKKDFYDLAAFITEGLEVHFVEHYREIFDIAFPDEQAEALAVER

SEQ ID NO: 123 - protein, 468 aa, Caenorhabditis elegans
MSLSGMAIRRLITKGVIPVCQVAPLSTSAEGSTNLKEVLSKKIPAHNAKVKSFRTEHGSTVVQNVNIDMIYGGMRSMKGMVTETSVLDPEEGIRFRGYSIPECQKLLPKAKGGEEPLPEAIWWLLCTGDVPSEAQTAAITKEWNARADLPTHVVRMLDNFPDNLHPMAQFIAAIAALNNESKFAGAYARGVAKASYWEYAYEDSMDLLAKLPTVAAIIYRNLYRDGSAVSVIDPKKDWSANFSSMLGYDDPLFAELMRLYLVIHSDHEGGNVSAHTSHLVGSALSDPYLSFSAAMAGLAGPLHGLANQEVLVFLNKIVGEIGFNYTEEQLKEWVWKHLKSGQVVPGYGHAVLRKTDPRYECQREFALKHLPNDDLFKLVSTLYKITPGILLEQGKAKNPWPNVDSHSGVLLQYFGMTEMSFYTVLFGVSRALGCLSQLIWARGMGLPLERPKSHSTDGLIKLALAAKK

SEQ ID NO: 124 - protein, 102 aa, Homo sapiens
MAGQAFRKFLPLFDRVLVERSAAETVTKGGIMLPEKSQGKVLQATVVAVGSGSKGKGGEIQPVSVKVGDKVLLPEYGGTKVVLDDKDYFLFRDGDILGKYVD

SEQ ID NO: 125 - protein, 604 aa, Homo sapiens
MGAALGTGTRLAPWPGRACGALPRWTPTAPAQGCHSKPGPARPVPLKKRGYDVTRNPHLNKGMAFTLEERLQLGIHGLIPPCFLSQDVQLLRIMRYYERQQSDLDKYIILMTLQDRNEKLFYRVLTSDVEKFMPIVYTPTVGLACQHYGLTFRRPRGLFITIHDKGHLATMLNSWPEDNIKAVVVTDGERILGLGDLGCYGMGIPVGKLALYTACGGVNPQQCLPVLLDVGTNNEELLRDPLYIGLKHQRVHGKAYDDLLDEFMQAVTDKFGINCLIQFEDFANANAFRLLNKYRNKYCMFNDDIQGTASVAVAGILAALRITNNKLSNHVFVFQGAGEAAMGIAHLLVMALEKEGVPKAEATRKIWMVDSKGLIVKGRSHLNHEKEMFAQDHPEVNSLEEVVRLVKPTAIIGVAAIAGAFTEQILRDMASFHERPIIFALSNPTSKAECTAEKCYRVTEGRGIFASGSPFKSVTLEDGKTFIPGQGNNAYVFPGVALGVIAGGIRHIPDEIFLLTAEQIAQEVSEQHLSQGRLYPPLSTIRDVSLRIAIKVLDYAYKHNLASYYPEPKDKEAFVRSLVYTPDYDSFTLDSYTWPKEAMNVQTV

SEQ ID NO: 126 - protein, 494 aa, Mus musculus
MAPRCWHWWRWSAWSGLRPSPSRSTPTPGFCQKFSTQEKTPQICVVGSGPAGFYTAQHLLKHHTHAHVDIYEKQLVPFGLVRFGVAPDHPEVKNVINTFTQTARSDRCAFQGNVVVGRDVSVPELREAYHAVVLSYGAEDHQPLGIPGEELPGVVSARAFVGWYNGLPENQELAPDLSCDTAVILGQGNVALDVARILLTPPEHLEKTDITEAALGALRQSRVKTVWIVGRRGPLQVAFTIKELREMIQLPGTRPILDPSDFLGLQDRIKDVPRPRRRLTELLLRTATEKPGVEEAARQALASRAWGLRFFRSPQQVLPTPDGQRVAGIRLAVTSLEGVGESTRAVPTGDVEDLPCGLLLSSVGYKSRPIDPSVPFDPKLGVIPNTEGRVVNVPGLYCSGWVKRGPTGVITTTMTDSFLTSQALLEDLKAGLLPSGPRPGYVAIQALLSNRGVRPVSFSDWEKLDAEEVSRGQGTGKPREKLVDRREMLRLLGH

SEQ ID NO: 127 - protein, 482 aa, Mus musculus
MAAARVLRTWSQNAVRLTCVRYFQTFNSARVLKPKCVCSVGYPLFKYSQPRHSLRTAAVLQGQVVQFKLSDIGEGIREVTIKEWYVKEGDTVSQFDSICEVQSDKASVTITSRYDGVIKRLYYNLDDIAYVGKPLIDIETEALKDSEEDVVETPAVSHDEHTHQEIKGQKTLATPAVRRLAMENNIKLSEVVGSGKDGRILKEDILSFLEKQTGAILPPSPKSEITPPPPQPKDRTFPTPIAKPPVFTGKDRTEPVTGFQKAMVKTMSAALKIPHFGYCDEIDLTQLVKLREELKPVALARGIKLSFMPFFLKAASLGLLQFPILNASVDENCQNITYKASHNIGIAMDTELGLIVPNVKNVQVRSVFGIGMELNRLQKLGSSGQLGTTDLTGGTFTLSNIGSIGGTYAKPVILPPEVAIGALGAIKALPRFDQKGDVYKAQIMNVSWSADHRVIDGATMSRFSNLWKSYLENPAFMLLDLK

SEQ ID NO: 128 - protein, 442 aa, Mus musculus
MSAAKIWRPSRGLRQAALLLLGRSGVRGLARSHPSRQQQQQFPSLDDKPQFPGASAEFVDKLEFIQPNVISGIPIYRVMDRQGQIINPSEDPHLPQEEVLKFYRSMTLLNTMDRILYESQRQGRISFYMTNYGEEGTHVGSAAALERTDLVFGQYREAGVLMYRDYPLELFMSQCYGNVNDPGKGRQMPVHYGCKERHFVTISSPLATQIPQAVGAAYAAKRANANRIVICYFGEGAASEGDAHAGFNFAATLECPIIFFCRNNGYAISTPTSEQYRGDGIAARGPGYGIKSIRVDGNDVFAVYNATKEARRRAVAENQPFLIEAMTYRIGHHSTSDDSSAYRSVDEVNYWDKQDHPISRLRQYLLNQGWWDEEQEKAWRKQSRKKVMEAFEQAERKLKPNPSLLFSDVYQEMPAQLRRQQESLARHLQTYGEHYPLDHFEK

SEQ ID NO: 129 - protein, 520 aa, Homo sapiens
MAALKLLSSGLRLCASARGSGATWYKGCVCSFSTSAHRHTKFYTDPVEAVKDIPDGATVLVGGFGLCGIPENLIDALLKTGVKGLTAVSNNAGVDNFGLGLLLRSKQIKRMVSSYVGENAEFERQYLSGELEVELTPQGTLAERIRAGGAGVPAFYTPTGYGTLVQEGGSPIKYNKDGSVAIASKPREVREFNGQHFILEEAITGDFALVKAWKADRAGNVIFRKSARNFNLPMCKAAETTVVEVEEIVDIGAFAPEDIHIPQIYVHRLIKGEKYEKRIERLSIRKEGDGEAKSAKPGDDVRERIIKRAALEFEDGMYANLGIGIPLLASNFISPNITVHLQSENGVLGLGPYPRQHEADADLINAGKETVTILPGASFFSSDESFAMIRGGHVDLTMLGAMQVSKYGDLANWMIPGKMVKGMGGAMDLVSSAKTKVVVTMEHSAKGNAHKIMEKCTLPLTGKQCVNRIITEKAVFDVDKKKGLTLIELWEGLTVDDVQKSTGCDFAVSPKLMPMQQIAN

SEQ ID NO: 130 - protein, 221 aa, Caenorhabditis elegans
MLQNTVRCVSKLVQPITGVAAVRSKHSLPDLPYDYADLEPVISHEIMQLHHQKHHATYVNNLNQIEEKLHEAVSKGNVKEAIALQPALKFNGGGHINHSIFWTNLAKDGGEPSAELLTAIKSDFGSLDNLQKQLSASTVAVQGSGWGWLGYCPKGKILKVATCANQDPLEATTGLVPLFGIDVWEHAYYLQYKNVRPDYVNAIWKIANWKNVSERFAKAQQ

SEQ ID NO: 131 - protein, 218 aa, Caenorhabditis elegans
MLQSTARTASKLVQPVAGVLAVRSKHTLPDLPFDYADLEPVISHEIMQLHHQKHHATYVNNLNQIEEKLHEAVSKGNLKEAIALQPALKFNGGGHINHSIFWTNLAKDGGEPSKELMDTIKRDFGSLDNLQKRLSDITIAVQGSGWGWLGYCKKDKILKIATCANQDPLEGMVPLFGIDVWEHAYYLQYKNVRPDYVHAIWKIANWKNISERFANARQ

SEQ ID NO: 132 - protein, 587 aa, Homo sapiens
MVTAAMLLQCCPVLARGPTSLLGKVVKTHQFLFGIGRCPILATQGPNCSQIHLKATKAGGDSPSWAKGHCPFMLSELQDGKSKIVQKAAPEVQEDVKAFKTDLPSSLVSVSLRKPFSGPQEQEQISGKVTHLIQNNMPGNYVFSYDQFFRDKIMEKKQDHTYRVFKTVNRWADAYPFAQHFSEASVASKDVSVWCSNDYLGMSRHPQVLQATQETLQRHGAGAGGTRNISGTSKFHVELEQELAELHQKDSALLFSSCFVANDSTLFTLAKILPGCEIYSDAGNHASMIQGIRNSGAAKFVFRHNDPDHLKKLLEKSNPKIPKIVAFETVHSMDGAICPLEELCDVSHQYGALTFVDEVHAVGLYGSRGAGIGERDGIMHKIDIISGTLGKAFGCVGGYIASTRDLVDMVRSYAAGFIFTTSLPPMVLSGALESVRLLKGEEGQALRRAHQRNVKHMRQLLMDRGLPVIPCPSHIIPIRVGNAALNSKLCDLLLSKHGIYVQAINYPTVPRGEELLRLAPSPHHSPQMMEDFVEKLLLAWTAVGLPLQDVSVAACNFCRRPVHFELMSEWERSYFGNMGPQYVTTYA

SEQ ID NO: 133 - protein, 640 aa, Homo sapiens
MESVVRRCPFLSRVPQAFLQKAGKSLLFYAQNCPKMMEVGAKPAPRALSTAAVHYQQIKETPPASEKDKTAKAKVQQTPDGSQQSPDGTQLPSGHPLPATSQGTASKCPFLAAQMNQRGSSVFCKASLELQEDVQEMNAVRKEVAETSAGPSVVSVKTDGGDPSGLLKNFQDIMQKQRPERVSHLLQDNLPKSVSTFQYDRFFEKKIDEKKNDHTYRVFKTVNRRAHIFPMADDYSDSLITKKQVSVWCSNDYLGMSRHPRVCGAVMDTLKQHGAGAGGTRNISGTSKFHVDLERELADLHGKDAALLFSSCFVANDSTLFTLAKMMPGCEIYSDSGNHASMIQGIRNSRVPKYIFRHNDVSHLRELLQRSDPSVPKIVAFETVHSMDGAVCPLEELCDVAHEFGAITFVDEVHAVGLYGARGGGIGDRDGVMPKMDIISGTLGKAFGCVGGYIASTSSLIDTVRSYAAGFIFTTSLPPMLLAGALESVRILKSAEGRVLRRQHQRNVKLMRQMLMDAGLPVVHCPSHIIPVRVADAAKNTEVCDELMSRHNIYVQAINYPTVPRGEELLRIAPTPHHTPQMMNYFLENLLVTWKQVGLELKPHSSAECNFCRRPLHFEVMSEREKSYFSGLSKLVSAQA

SEQ ID NO: 134 - protein, 903 aa, Homo sapiens; identical to SEQ ID NO: 61

SEQ ID NO: 135 - protein, 586 aa, Mus musculus
WFVLSAGQQDFGLRMVAAAMLLRSCPVLSQGPTGLLGKVAKTYQFLFSIGRCPILATQGPTCSQIHLKATKAGGELQDRKSKIVQRAAPEVQEDVKTFKTDLLSTMDSTTRSHSFPSFQEPEQTEGAVPHLIQNNMTGSQAFGYDQFFRDKIMEKKQDHTYRVFKTVNRWANAYPFAQHFSEASMASKDVSVWCSNDYLGISRHPRVLQAIEETLKNHGAGAGGTRNISGTSKFHVELEQELAELHQKDSALLFSSCFVANDSTLFTLAKLLPGCEIYSDAGNHASMIQGIRNSGAAKFVFRHNDPGHLKKLLEKSDPKTPKIVAFETVHSMDGAICPLEELCDVAHQYGALTFVDEVHAVGLYGARGAGIGERDGIMHKLDIISGTLGKAFGCVGGYIASTRDLVDMVRSYAAGFIFTTSLPPMMLSGALESVRLLKGEEGQALRRAHQRNVKHMRQLLMDRGFPVIPCPSHIIPIRVGNAALNSKICDLLLSKHSIYVQAINYPTVPRGEELLRLAPSPHHSPQMMENFVEKLLLAWTEVGLPLQDVSVAACNFCHRPVHFELMSEWERSYFGNMGPQYVTTYA

SEQ ID NO: 136 - protein, 994 aa, Neurospora crassa
MPLICARPLGRLVPKLGASLRPVLSSHAASPRRPVGVALEQHLGTESWKRFYADHKLDLLALDQKWRQKWAESSREKGNKEDEKNKYVLPMFPYPSGHLHLGHLRVYTIADVIARFQTLQGHKVLLPMGWDAFGLPAENAAIERGINPATWTKANIAKMKEQLGHMNGSWDWNCELATCDPDFYKHTQKIFLALHEKGLAYQAEAEVNYDPVDKTVLANEQVDANGCSWRSGARVEKRKLKQWFLKISEFRESLLKDLETLAKNEAWPERVLAMQKNWLGKSKGATVKFPVLAFGQGTPSAIEVFTSRPDTLFGVQYIALAATHPSVQQLAKSDPELQAFLSTLPGLSPDSKVGYLLPHIRAVNPLAYHEETPEDTKVSLPIYVAPYVLGDYGEGAVMGVPGHDLRDHAFWKEHHYDAPVRFVLAASEDESTTAMPNEPFTEHGVMNANSGIFKGKSSKEAGEMLVKLLEPAGLAKETEKWRLRDWLISRQRYWGTPIPIVHCGSCGTVPVPDEQLPVELPEVDEHWAGKKTGNPLESQTDWINTSCPKCGGEAKRDTDTMDTFVDSSWYYMRFIDAHNKEAPFSPEKAKVLTPVDLYIGGVEHAILHLLYSRFIYKFLMTSSFAGKEAESAEAAESASSEVYEPFKRLITQGMVHGKTYTDPATGRFLKPDEVDLSDPHQPKVVATGALANVSYEKMSKSKHNGVDPTTFIAQYGADATRAHILFQAPVSEILDWDESKITGVTRWLSRVHDLVQKIACSSTSETPSSASTVKAFFEQQQQQPESVADPAKLDASITIWREVQRTISSVTASYNKVYTLNTVISDLMSLTNVIASPSNYDAADPLIRREAVSALIRMMAPVAPAFAEECWHVLFPESSSSSLFSGSGSGSGSGSGDEQAARFPVPDGTEGLLKSRKQTCAVQLNGKTKFAVEIGTPPAGLLEKSAEEKLREFIVGEVLKTEEGRAKLEGRGVDVSKAKKVIVVRGGKLLNVVM

SEQ ID NO: 137 - protein, 531 aa, Neurospora crassa
MLLRTKALIRSGGSIAKYAAANPSCFILQRRGLRREFGPKYTAKINEAEENWQARAEAIKKGKKQNTWDLFEERGYVKDTAGTKEHIAELMRTRRIGAYVGIDPTAPSLHVGHLLPLMPLFWMYLEGYKAFTLIGGSTAKIGDPTGRLKSRDHLSSSDATMNMTKIHYQLKKLWENVDTQMRARGYEADWARKRGIVNNNHWWNKQPMLEVLRRVGHALRIGPMLSRDTVKNKMTQGDGVSFAEFTYPIMQGWDWFELFYQQGVQMQIGGSDQYGNIISGLEVVKAARESEPDPQERKYVTPKTALDECVGFTVPLLTDSSGAKFGKSAGNAIWLDPYQTSVFDFYGYFVRRSDQEVENLLKLFTFMPISEITKTMEEHIKDPSKRVAQHTLAREVVTLVHGKQEASAAEDQHRMMYTGQMTIPQVSRAKDAATGGDQYKTISDQPVTLNNAPRIDMILPESLIMGKSIGRILSPPVLPAAPPRATSSRLPRAATSADAQSRRRERHHEPGPHLFYARQAVVPRRDPALPD

SEQ ID NO: 138 - protein, 350 aa, Caenorhabditis elegans
MRNYDFQPNNLRLLSTSTHPTIYFTGFQPTGTPHLGNFFGSIEPWTELQNSVDKNILMMLSVVDQHAISLGPLPANELRQNTHGMTASLIACGVDPNRTLLFRQSDVPQIAQFSWFLGSLQTTSKLARLPQYKEKKERFKKGDIPVGLLTYPLLQAADVLTFKATTVPVGEDQSQHLNLLGGLAYAFNKTYETEIFPIPKQLTRESHARIRSLRGPEKKMSKSSGGPRSRIEITDSRSTIIEKCQLAQSDNAGKVTYDKENRLAVSNLLDLYSAVTKTQTSEIDFSNWTTLDLKMNLAEAVDKRLAPIRQKFEELQNTGEVDKVLTENGEKAREIAEKNLEEIRRTIGFL

SEQ ID NO: 139 - protein, 297 aa, Mus musculus
MVHQVLYRALVSTKWLAESIRSGRLGPSLRVLDASWYSPGTRQARKEYQERHVPGASFFDIEECRDTTSPYEMMLPSEAHFGDYVGNLGISNDTHVVVYDGDDLGSFYAPRVWWMFRVFGHRTVSVLNGGFRNWLKEGHPVTSEPSRPEPAVFKATLNLSLLKTYEQVLENLQSKRFQLVDSRAQGRYLGTQPEPDIVGLDSGHIRGSVNMPFMDFLTKDGFEKSPEELRAIFQDKKVDLSQPLIATCRKGVTACHVALAAYLCGKPDVAVYDGSWSEWFRRAPPETRVSQGKSGKA

SEQ ID NO: 140 - protein, 713 aa, Homo sapiens
MLCVGRLGGLGARAAALPPRRAGRGSLEAGIRARRVSTSWSPVGAAFNVKPQGSRLDLFGERRRLFGVPELSAPEGFHIAQEKALRKTELLVDRACSTPPGPQTVLIFDELSDSLCRVADLADFVKIAHPEPAFREAAEEACRSIGTMVEKLNTNVDLYQSLQKLLADKKLVDSLDPETRRVAELFMFDFEISGIHLDKEKRKRAVDLNVKILDLSSTFLMGTNFPNKIEKHLLPEHIRRNFTSAGDHIIIDGLHAESPDDLVREAAYKIFLYPNAGQLKCLEELLSSRDLLAKLVGYSTFSHRALQGTIAKNPETVMQFLEKLSDKLSERTLKDFEMIRGMKMKLNAQNSEVMPWDPPYYSGVIRAERYNIEPSLYCPFFSLGACMEGLNILLNRLLGISLYAEQPAKGEVWSEDVRKLAVVHESEGLLGYIYCDFFQRADKPHQDCHFTIRGGRLKEDGDYQLPVVVLMLNLPRSSRSSPTLLTPGMMENLFHEMGHAMHSMLGRTRYQHVTGTRCPTDFAEVPSILMEYFANDYRVVNQFARHYQTGQPLPKNMVSRLCESKKVCAAADMQLQVFYATLDQIYHGKHPLRNSTTDILKETQEKFYGLPYVPNTAWQLRFSHLVGYGARYYSYLMSRAVASMVWKECFLQDPFNRAAGERYRREMLAHGGGREPMLMVEGMLQKCPSVDDFVSALVSDLDLDFETFLMDSE

SEQ ID NO: 141 - protein, 501 aa, Homo sapiens
MAASWRLGCDPRLLRYLVGFPGRRSVGLVKGALGWSVSRGRNWRWFHSTQWLRGDPIKILMPSLSPTMEEGNIVKWLKKEGEAVSAGDALCEIETDKAVVTLDASDDGILAKIVVEEGSKNIRLGSLIGLIVEEGEDWKHVEIPKDVGPPPPVSKPSEPRPSPEPQISIPVKKEHIPGTLRFRLSPAARNILEKHSLDASQGTATGPRGIFTKEDALKLVQLKQTGKITESRPTPAPTATPTAPSPLQATAGPSYPRPVIPPVSTPGQPNAVGTFTEIPASNIRRVIAKRLTESKSTVPHAYATADCDLGAVLKVRQDLVKDDIKVSVNDFIIKAAAVTLKQMPDVNVSWDGEGPKQLPFIDISVAVATDKGLLTPIIKDAAAKGIQEIADSVKALSKKARDGKLLPEEYQGGSFSISNLGMFGIDEFTAVINPPQACILAVGRFRPVLKLTEDEEGNAKLQQRQLITVTMSSDSRVVDDELATRFLKSFKANLENPIRLA

SEQ ID NO: 142 - protein, 430 aa, Homo sapiens
MALLHSGRVLPGIAAAFHPGLAAAASARASSWWTHVEMGPPDPILGVTEAFKRDTNSKKMNLGVGAYRDDNGKPYVLPSVRKAEAQIAAKNLDKEYLPIGGLAEFCKASAELALGENSEVLKSGRFVTVQTISGTGALRIGASFLQRFFKFSRDVFLPKPTWGNHTPIFRDAGMQLQGYRYYDPKTCGFDFTGAVEDISKIPEQSVLLLHACAHNPTGVDPRPEQWKEIATVVKKRNLFAFFDMAYQGFASGDGDKDAWAVRHFIEQGINVCLCQSYAKNMGLYGERVGAFTMVCKDADEAKRVESQLKILIRPMYSNPPLNGARIAAAILNTPDLRKQWLQEVKGMADRIIGMRTQLVSNLKKEGSTHNWQHITDQIGMFCFTGLKPEQVERLIKEFSIYMTKDGRISVAGVTSSNVGYLAHAIHQVTK

SEQ ID NO: 143 - protein, 439 aa, Homo sapiens
MFSKLAHLQRFAVLSRGVHSSVASATSVATKKTVQGPPTSDDIFEREYKYGAHNYHPLPVALERGKGIYLWDVEGRKYFDFLSSYSAVNQGHCHPKIVNALKSQVDKLTLTSRAFYNNVLGEYEEYITKLFNYHKVLPMNTGVEAGETACKLARKWGYTVKGIQKYKAKIVFAAGNFWGRTLSAISSSTDPTSYDGFGPFMPGFDIIPYNDLPALERALQDPNVAAFMVEPIQGEAGVVVPDPGYLMGVRELCTRHQVLFIADEIQTGLARTGRWLAVDYENVRPDIVLLGKALSGGLYPVSAVLCDDDIMLTIKPGEHGSTYGGNPLGCRVAIAALEVLEEENLAENADKLGIILRNELMKLPSDVVTAVRGKGLLNAIVIKETKDWDAWKVCLRLRDNGLLAKPTHGDIIRFAPPLVIKEDELRESIEIINKTILSF

SEQ ID NO: 144 - protein, 392 aa, Homo sapiens; identical to SEQ ID NO: 102

SEQ ID NO: 145 - protein, 439 aa, Mus musculus
MLSKLASLQTIAALRRGVHTSVASATSVATKKTEQGPPSSEYIFERESKYGAHNYHPLPVALERGKGIYMWDVEGRQYFDFLSAYGAVSQGHCHPKIIDAMKSQVDKLTLTSRAFYNNVLGEYEEYITKLFNYNKVLPMNTGVEAGETACKLARRWGYTVKGIQKYKAKIVFADGNFWGRTLSAISSSTDPTSYDGFGPFMPGFETIPYNDLPALERALQDPNVAAFMVEPIQGEAGVIVPDPGYLTGVRELCTRHQVLFIADEIQTGLARTGRWLAVDHENVRPDMVLLGKALSGGLYPVSAVLCDDEIMLTIKPGEHGSTYGGNPLGCRIAIAALEVLEEENLAENADKMGAILRKELMKLPSDVVTSVRGKGLLNAIVIRETKDCDAWKVCLRLRDNGLLAKPTHGDIIRLAPPLVIKEDEIRESVEIINKTILSF

SEQ ID NO: 146 - protein, 615 aa, Homo sapiens
RVTSRSGPAPARRNSVTTGYGGVRALCGWTPSSGATPRNRLLLQLLGSPGRRYYSLPPHQKVPLPSLSPTMQAGTIARWKKKEGDKINEGDLIAEVETDKATVGFESLEECYMAKILVAEGTRDVPIGAIICITVGKPEDIEAFKNYTLDSSAAPTPQAAPAPTPAATASPPTPSAQAPGSSYPPHMQVLLPALSPTMTMGTVQRWEKKVGEKLSEGDLLAEIETDKATIGFEVQEEGYLAKILVPEGTRDVPLGTPLCIIVEKEADISAFADYRPTEVTDLKPQVPPPTPPPVAAVPPTPQPLAPTPSAPCPATPAGPKGRVFVSPLAKKLAVEKGIDLTQVKGTGPDGRITKKDIDSFVPSKVAPAPAAVVPPTGPGMAPVPTGVFTDIPISNIRRVIAQRLMQSKQTIPHYYLSIDVNMGEVLLVRKELNKILEGRSKISVNDFIIKASALACLKVPEANSSWMDTVIRQNHVVDVSVAVSTPAGLITPIVFNAHIKGVETIANDVVSLATKAREGKLQPHEFQGGTFTISNLGMFGIKNFSAIINPPQACILAIGASEDKLVPADNEKGFDVASMMSVTLSCDHRVVDGAVGAQWLAEFRKYLEKPITMLL

SEQ ID NO: 147 - protein, 177 aa, Saccharomyces cerevisiae
MKHTTSTMLRTTRLWTTRMPAVSKLFLRNSSGNALNKNKLPFLYSSQGPQAVRYTSQHEWIAVHQDKTAFVGITKYATDSLGDATYVELPEVGTEISQGESLGSIESVKSASEIYQPADGTVEEINTNLEENPGVVNEDPMGDGWLVKMKLGEGVNVEQVEGLMSLEQYEKTLVHDD

SEQ ID NO: 148 - protein, 1133 aa, Saccharomyces cerevisiae
MLRTRTTKTLSTVARTTRAIQYYRSIAKTAAVSQRRFASTLTVRDVENIKPSHIIKSPTWQEFQHQLKDPRYMEHFAQLDAQFARHFMATNSGKSILAKDDSTSQKKDEDVKIVPDEKDTDNDVEPTRDDEIVNKDQEGEASKNSRSSASGGGQSSSSRSDSGDGSSKQKPPKDVPEVYPQMLALPIARRPLFPGFYKAVVISDERVMKAIKEMLDRQQPYIGAFMLKNSEEDTDVITDKNDVYDVGVLAQITSAFPSKDEKTGTETMTALLYPHRRIKIDELFPPNEEKEKSKEQAKDTDTETTVVEDANNPEDQESTSPATPKLEDIVVERIPDSELQHHKRVEATEEESEELDDIQEGEDINPTEFLKNYNVSLVNVLNLEDEPFDRKSPVINALTSEILKVFKEISQLNTMFREQIATFSASIQSATTNIFEEPARLADFAAAVSAGEEDELQDILSSLNIEHRLEKSLLVLKKELMNAELQNKISKDVETKIQKRQREYYLMEQLKGIKRELGIDDGRDKLIDTYKERIKSLKLPDSVQKIFDDEITKLSTLETSMSEFGVIRNYLDWLTSIPWGKHSKEQYSIPRAKKILDEDHYGMVDVKDRILEFIAVGKLLGKVDGKIICFVGPPGVGKTSIGKSIARALNRKFFRFSVGGMTDVAEIKGHRRTYIGALPGRVVQALKKCQTQNPLILIDEIDKIGHGGIHGDPSAALLEVLDPEQNNSFLDNYLDIPIDLSKVLFVCTANSLETIPRPLLDRMEVIELTGYVAEDKVKIAEQYLVPSAKKSAGLENSHVDMTEDAITALMKYYCRESGVRNLKKHIEKIYRKAALQVVKKLSIEDSPTSSADSKPKESVSSEEKAENNAKSSSEKTKDNNSEKTSDDIEALKTSEKINVSISQKNLKDYVGPPVYTTDRLYETTPPGVVMGLAWTNMGGCSLYVESVLEQPLHNCKHPTFERTGQLGDVMKESSRLAYSFAKMYLAQKFPENRFFEKASIHLHCPEGATPKDGPSAGVTMATSFLSLALNKSIDPTVAMTGELTLTGKVLRIGGLREKAVAAKRSGAKTIIFPKDNLNDWEELPDNVKEGLEPLAADWYNDIFQKLFKDVNTKEGNSVWKAEFEILDAKKEKD

SEQ ID NO: 149 - protein, 232 aa, Saccharomyces cerevisiae
MFPYLTRMNLSIKMGGLTLKESSPNAFLNNTTIARRFKHEYAPRFKIVQKKQKGRVPVRTGGSIKGSTLQFGKYGLRLKSEGIRISAQQLKEADNAIMRYVRPLNNGHLWRRLCTNVAVCIKGNETRMGKGKGGFDHWMVRVPTGKILFEINGDDLHEKVAREAFRKAGTKLPGVYEFVSLDSLVRVGLHSFKNPKDDPVKNFYDENAKKPSKKYLNILKSQEPQYKLFRGR

SEQ ID NO: 150 - protein, 541 aa, Saccharomyces cerevisiae
MLRLARFYSLARTKAIHSHGAPFRPEYALKCGLEIHTQLNTKNKLFSQSTNSATSLVDAPNHHTSYYDIALPGTQPVLNLEAILFAMKLSLALGSQVNSISQFDRKHYFYGDQPQGYQLTQHYRPFARGGKINLSKELDDIDESAKEIGILQLQIEQDTGKSHYTETDKDVITLVDLNRSNVPLIELVTKPDFSDIKQVRAFIKKYQNLVRHLHISSGDLETGAMRVDVNLSINEYARVELKNLPNTSSIINAIKYEYQRQVELISVGDTSSLMEPETRGWTGSSTVKLRSKETTIDYRYMPDPELPYINLAPDVISGVRGLMPQLPDDIMRILMKKPYQLSLKDAKILTYNSNQNDMYNHEALRSYYLDTFREFSKLAGERSNAKLPTNWIIHEFLGDLNKLQIPLAKAKEILAPPVFAQFLKLLHEEVISATSGKMLLFHILENFEQSNCQDLSIPDFSKLIEKFELHAINQVDPQELMDLCNDVIAQHTDDTFIRNLVTGKKKSSLKFLIGQGMRRSQGRIKANEFEKKFKEILNIQW

SEQ ID NO: 151 - protein, 177 aa, Saccharomyces cerevisiae
MLKSTLRLSRISLRRGFTTIDCLRQQNSDIDKIILNPIKLAQGSNSDRGQTSKSKTDNADILSMEIPVDMMQSAGRINKRELLSEAEIARSSVENAQMRFNSGKSIIVNKNNPAESFKRLNRIMFENNIPGDKRSQRFYMKPGKVAELKRSQRHRKEFMMGFKRLIEIVKDAKRKGY

SEQ ID NO: 152 - protein, 162 aa, Saccharomyces cerevisiae
MSSSQVVRDSAKKLVNLLEKYPKDRIHHLVSFRDVQIARFRRVAGLPNVDDKGKSIKEKKPSLDEIKSIINRTSGPLGLNKEMLTKIQNKMVDEKFTEESINEQIRALSTIMNNKFRNYYDIGDKLYKPAGNPQYYQRLINAVDGKKKESLFTAMRTVLFGK

SEQ ID NO: 153 - protein, 196 aa, Saccharomyces cerevisiae
MPPERTGTNANEHTFCSLLMLKSIFAKRFASTGSYPGSTRITLPRRPAKKIQLGKSRPAIYHQFNVKMELSDGSVVIRRSQYPKGEIRLIQDQRNNPLWNPSRDDLVVVDANSGGSLDRFNKRYSSLFSVDSTTPNSSSETVELSEENKKKTQIKKEEKEDVSEKAFGMDDYLSLLDDSEQQIKSGKLASKKRDKK

SEQ ID NO: 154 - protein, 278 aa, Saccharomyces cerevisiae
MFSRLSLFRRAALAPAPMRMSFRTIYQKTEDELPRRIVPKLATFYSANPNHEDRINRLERLLRKYIKLPSQNNNEAQQTKAPWISFDEYALIGGGTKLKPTQYTQLLYMLNKLHNIDPQLTNDEITSELSQYYKKSSMLSNNIKIKTLDEFGRSIAVGKRKSSTAKVFVVRGTGEILVNGRQLNDYFLKMKDRESIMYPLQVIESVGKYNIFATTSGGGPTGQAESIMHAIAKALVVFNPLLKSRLHKAGVLTRDYRHVERKKPGKKKARKMPTWVKR

SEQ ID NO: 155 - protein, 366 aa, Saccharomyces cerevisiae
MFSRLPTSLARNVARRAPTSFVRPSAAAAALRFSSTKTMTVREALNSAMAEELDRDDDVFLIGEEVAQYNGAYKVSKGLLDRFGERRVVDTPITEYGFTGLAVGAALKGLKPIVEFMSFNFSMQAIDHVVNSAAKTHYMSGGTQKCQMVFRGPNGAAVGVGAQHSQDFSPWYGSIPGLKVLVPYSAEDARGLLKAAIRDPNPVVFLENELLYGESFEISEEALSPEFTLPYKAKIEREGTDISIVTYTRNVQFSLEAAEILQKKYGVSAEVINLRSIRPLDTEAIIKTVKKTNHLITVESTFPSFGVGAEIVAQVMESEAFDYLDAPIQRVTGADVPTPYAKELEDFAFPDTPTIVKAVKEVLSIE

SEQ ID NO: 156 - protein, 520 aa, Saccharomyces cerevisiae
MLKSASQNFFRAYSSRIGRYAATASGKLAQSRLSNIPTPKALKKFLDEYIVGQEIGKKVLSVAVYNHYLRINDKQKKGELQRQRELMEREKIADDRDEPIFSGNSESKAGWRNLQRQFNLAGREVDEDLELSKSNVLVVGPSGSGKTLLATTLAKILNVPIAITDCTQLTQAGYIGEDVEVCIERLLVNAEFDVARAEKGIIVLDEIDKLAKPAASIGTKDVSGEGVQQSLLKIIEGHKVEITVKRPVKHDIDGQKNQTTTKKDEVFVVDTSNILFMIMGAFVGLDKHIVKRIEDMKKIQKAGESVESSNSKEVEKERAKKFRFSNTLEQVELDNGKKVCALDLTTPTDLVSFGLIPELIGRVPIITALQPLQRDDLFHILKEPKNALLDQYEYIFKQFGVRLCVTQKALKKVAQFALKEGTGARGLRGIMERLLLNVNYDCPGSNIAYVLIDEATVDSLQETEHSLASQVDVKYYSGDEKDSLIRDVSEEDKKLGVMLEKELGHSANIHTPTIPKRSLT

SEQ ID NO: 157 - protein, 307 aa, Saccharomyces cerevisiae
MFKRQLSTSVRYLQHYDESLLSRYYPESLLKSIKLAQQTIPEDTKFRVSRNVEFAPPYLDDFTKIHPFWDYKPGMPHLHAQEENNNFSIFRWDQVQQPLPGEGNILPPGVSLPNDGGRKSKSADVAAGLHKQTGVDPDYITRKLTMKPLVMKRVSNQTGKGKIASFYALVVVGDKNGMVGLGEGKSREEMSKAIFKAHWDAVRNLKEIPRYENRTIYGDIDFRYHGVKLHLRSAKPGFGLRVNHVIFEICECAGIKDLSGKVYKSRNDMNIAKGTIEAFTKAQKTLDEVALGRGKKLVDVRKVYYSS

SEQ ID NO: 158 - protein, 105 aa, Saccharomyces cerevisiae
MLARSLGYRLISTSRILYNKPTVKSVVSSCPAGTSLNLNIWKSGKDAVALEDKEYPNWLWSVLDSDHVVEHAAEDPEGQALLKRRKNIRKANRQRIKQNNFLSQL

SEQ ID NO: 159 - protein, 146 aa, Saccharomyces cerevisiae
MKGSPISQFSKTSINALTRPWKKYRDGELFYGLSKVGNKRVPLTTKQGNKTMYKGTRASGIGRHTKFGGYVINWKKVRTYVTPDMVNFELKPYVNANVPPLKHEFKGFSGGPLDPRLQLLKIKEYIVNGRVQSEGATDTSCYKERG

SEQ ID NO: 160 - protein, 183 aa, Saccharomyces cerevisiae
MNSLIFGKQLAFHKIVPTTAIGWLVPLGNPSLQIPGQKQLGSIHRWLREKLQQDHKDTEDKDFFSNNGILLAVPKKKVSHQKKRQKLYGPGKKQLKMIHHLNKCPSCGHYKRANTLCMYCVGQISHIWKTHTAKEEIKPRQEEELSELDQRVLYPGRRDTKYTKDLKDKDNYLERRVRTLKKD

SEQ ID NO: 161 - protein, 492 aa, Saccharomyces cerevisiae
MFHAFTFLKGGRFYSSLTVKSLYEQVHHTSHDPISINGWIKSIRLLKRIAFLDLQDGTSVNPLRIVIPLTNTDEVQFLKILKTGQTLSISNATWQSTPNRKQPFELQIKNPVKSIKLVGPVSENYPLQKKYQTLRYLRSLPTLKYRTAYLSAILRLRSFVEFQFMLYFQKNHFTKVSPPILTSNDCEGAGELFQVSTNTSPTASSYFGKPTYLTVSTQLHLEILALSLSRCWTLSPCFRAEKSDTPRHLSEFWMLEVEMCFVNSVNELTSFVETTIKHIIKACIDNQQELLPKQFISSQENNASSELSINQETQQIKTRWEDLINEKWHNITYTNAIEILKKRHNEVSHFKYEPKWGQPLQTEHEKFLAGEYFKSPVFVTDYPRLCKPFYMKQNSTPDDTVGCFDLLVPGMGEIIGGSLREDDYDKLCREMKARGMNRSGELDWYVSLRKEGSAPHGGFGLGFERFISYLYGNHNIKDAIPFYRTSAESIDF

SEQ ID NO: 162 - protein, 135 aa, Saccharomyces cerevisiae
MFLRTQARFFHATTKKMDFSKMSIVGRIGSEFTEHTSANNNRYLKYSIASQPRRDGQTNWYNITVFNEPQINFLTEYVRKGALVYVEADAANYVFERDDGSKGTTLSLVQKDINLLKNGKKLEDAEGQENAASSE

SEQ ID NO: 163 - protein, 169 aa, Saccharomyces cerevisiae
MWSRNVRLLGSWTRSYMVPATKRKTIPVYPPVQRIASSQIMKQVALSEIESLDPGAVKRKLISKKNKDRLKAGDVVRIVYDSSKCSYDTFVGYILSIDRKQLVQDASLLLRNQIAKTAVEIRVPLFSPLIERIDLLTPHVSSRQRNKHYYIRGTRLDVGDLEAGLRRKK

SEQ ID NO: 164 - protein, 249 aa, Saccharomyces cerevisiae
MLQLRFMPGWVPRNGFFGLKETIGTVHKRFYALASEQPSRKTVKPLDSRKTFLIDTYKHLMENSSMIFFVHYNNLSKTEDHHFRFKIKQTGGKLTKVRNNLFEVYLRNSHLPDPCGFVKRKEQNWKHPLLPLLKGPTATITYEDTNPQQVAKLLKVLQSAQDKLMVIGAKVENEVLNVEKINTFKTLPTKPEMQSQLVSVLQMLSGLGLVRTLENSSNALYLTLKSHNDNQKPKEDVESTTDAESKGSK

SEQ ID NO: 165 - protein, 463 aa, Saccharomyces cerevisiae
MLSRATRTAAAKSLVKSKVARNVMAASFVKRHASTSLFKQANKVESLGSIYLSGKKISVAANPFSITSNRFKSTSIEVPPMAESLTEGSLKEYTKNVGDFIKEDELLATIETDKIDIEVNSPVSGTVTKLNFKPEDTVTVGEELAQVEPGEAPAEGSGESKPEPTEQAEPSQGVAARENSSEETASKKEAAPKKEAAPKKEVTEPKKADQPKKTVSKAQEPPVASNSFTPFPRTETRVKMNRMRLRIAERLKESQNTAASLTTFNEVDMSALMEMRKLYKDEIIKKTGTKFGFMGLFSKACTLAAKDIPAVNGAIEGDQIVYRDYTDISVAVATPKGLVTPVVRNAESLSVLDIENEIVRLSHKARDGKLTLEDMTGGTFTISNGGVFGSLYGTPIINSPQTAVLGLHGVKERPVTVNGQIVSRPMMYLALTYDHRLLDGREAVTFLKTVKELIEDPRKMLLW

SEQ ID NO: 166 - protein, 664 aa, Saccharomyces cerevisiae
MLTSILIKGRTPVLASRNLLAALSNCNHITWAVSRRLYNDGNRDQRNFGRNQRNNNSNRYRNSRFNSRPRTRSREDDDEVHFDKTTFSKLIHVPKEDNSKEVTLDSLLEEGVLDKEIHKAITRMEFPGLTPVQQKTIKPILSSEDHDVIARAKTGTGKTFAFLIPIFQHLINTKFDSQYMVKAVIVAPTRDLALQIEAEVKKIHDMNYGLKKYACVSLVGGTDFRAAMNKMNKLRPNIVIATPGRLIDVLEKYSNKFFRFVDYKVLDEADRLLEIGFRDDLETISGILNEKNSKSADNIKTLLFSATLDDKVQKLANNIMNKKECLFLDTVDKNEPEAHERIDQSVVISEKFANSIFAAVEHIKKQIKERDSNYKAIIFAPTVKFTSFLCSILKNEFKKDLPILEFHGKITQNKRTSLVKRFKKDESGILVCTDVGARGMDFPNVHEVLQIGVPSELANYIHRIGRTARSGKEGSSVLFICKDELPFVRELEDAKNIVIAKQEKYEPSEEIKSEVLEAVTEEPEDISDIVISLISSYRSCIKEYRFSERRILPEIASTYGVLLNDPQLKIPVSRRFLDKLGLSRSPIGKAMFEIRDYSSRDGNNKSYDYDDDSEISFRGNKNYNNRSQNRDYDDEPFRRSNNNRRSFSRSNDKNNYSSRNSNIY

SEQ ID NO: 167 - protein, 147 aa, Saccharomyces cerevisiae
MLAQTFKKPHRAVLEQVSGTTVFIRNKRTKSKSSLSPLAQRVVTQLSVMSASRKQPKLLKLAREDLIKHQTIEKCWSIYQQQQRERRNLQLELQYKSIERSMNLLQELSPRLFEAANASEKGKRFPMEMKVPTDFPPNTLWHYNFRK

SEQ ID NO: 168 - protein, 499 aa, Saccharomyces cerevisiae
MLRIRSLLNNKRAFSSTVRTLTINKSHDVVIIGGGPAGYVAAIKAAQLGFNTACVEKRGKLGGTCLNVGCIPSKALLNNSHLFHQMHTEAQKRGIDVNGDIKINVANFQKAKDDAVKQLTGGIELLFKKNKVTYYKGNGSFEDETKIRVTPVDGLEGTVKEDHILDVKNIIVATGSEVTPFPGIEIDEEKIVSSTGALSLKEIPKRLTIIGGGIIGLEMGSVYSRLGSKVTVVEFQPQIGASMDGEVAKATQKFLKKQGLDFKLSTKVISAKRNDDKNVVEIVVEDTKTNKQENLEAEVLLVAVGRRPYIAGLGAEKIGLEVDKRGRLVIDDQFNSKFPHIKVVGDVTFGPMLAHKAEEEGIAAVEMLKTGHGHVNYNNIPSVMYSHPEVAWVGKTEEQLKEAGIDYKIGKFPFAANSRAKTNQDTEGFVKILIDSKTERILGAHIIGPNAGEMIAEAGLALEYGASAEDVARVCHAHPTLSEAFKEANMAAYDKAIHC

SEQ ID NO: 169 - protein, 427 aa, Saccharomyces cerevisiae
MYSRKSLSLISKCGQLSRLNAQAALQARRHLSIHEYRSAQLLREYGIGTPEGFPAFTPEEAFEAAKKLNTNKLVIKAQALTGGRGKGHFDTGYKSGVHMIESPQQAEDVAKEMLNHNLITKQTGIAGKPVSAVYIVKRVDTKHEAYLSILMDRQTKKPMIIASSQGGMNIEEVAERTPDAIKKFSIETSKGLSPQMAKDVAKSLGFSPDAQDEAAKAVSNLYKIFMERDATQVEINPLSEIEHDPTHKIMCTDAKFGFDDNASFRQEKIYSWRDLSQEDPDEVKAKKYDLNFVKLKGNIGCLVNGAGLAMATMDVIKLNGGDPANFLDCGGGATPETIKQGFELILSNKNVDAIFVNIFGGIVRCDYVALGLVEAARELEVRVPIVARLQGTKVEEGRDIINKSGVKIYSFDELDPAAKKVVELTQN

SEQ ID NO: 170 - protein, 233 aa, Saccharomyces cerevisiae
MFAKTAAANLTKKGGLSLLSTTARRTKVTLPDLKWDFGALEPYISGQINELHYTKHHQTYVNGFNTAVDQFQELSDLLAKEPSPANARKMIAIQQNIKFHGGGFTNHCLFWENLAPESQGGGEPPTGALAKAIDEQFGSLDELIKLTNTKLAGVQGSGWAFIVKNLSNGGKLDVVQTYNQDTVTGPLVPLVAIDAWEHAYYLQYQNKKADYFKAIWNVVNWKEASRRFDAGKI

SEQ ID NO: 171 - protein, 266 aa, Saccharomyces cerevisiae
MFLRSVNRAVTRSILTTPKPAVVKSSWRVFTVANSKRCFTPAAIMRNQETQRVGDILQSELKIEKETLPESTSLDSFNDFLNKYKFSLVETPGKNEAEIVRRTESGETVHVFFDVAQIANLPYNNAMDENTEQNEDGINEDDFDALSDNFANVNVVISKESASEPAVSFELLMNLQEGSFYVDSATPYPSVDAALNQSAEAEITRELVYHGPPFSNLDEELQESLEAYLESRGVNEELASFISAYSEFKENNEYISWLEKMKKFFH

SEQ ID NO: 172 - protein, 224 aa, Saccharomyces cerevisiae
MASTLLTIITSILRCTGFILSKIAKGSRIRELLERCRSSLGVDLHSLLKQLCRDNLKCVALIFMLQLKFIWPVARITPIYRPFTSHPFRNLATSSSISSTKAKTTKTDTTPLKLSNELYAIFKIHNRPYLVTEGDRVILPFKLKQAEVGDILNMTDVTTLGSRNYKLVGHPINTSLYTLKATVVGKTKRAFQTREVTKRRNRRVRHAKSKGDLTILRISELSMN

SEQ ID NO: 173 - protein, 247 aa, Saccharomyces cerevisiae
MLHCARRYMLVRPRLLWQSGTCVARFQSSVRTPASEPSAEKGVDEWLEAINELREEFSAKEYLPETSLAPPGQSKVDLLQGSQAGSKIKPTAEQLAQWEALKSVPIPPRKNATLDHITNMIMRHGKKEKAQTILSRALYLVYCQTRQDPIQALEKSLDELAPLMMTKTFNTGVAKASVIPVPLNKRQRNRIAWNWIVQSANQRVSSDFAVRLGEELTAIAKGTSSAFEKRDQIHKTAIAHRAYIQLK

SEQ ID NO: 174 - protein, 264 aa, Saccharomyces cerevisiae
MFKSVAKLGKSPIFYLNSQRLIHIKTLTTPNENALKFLSTDGEMLFTQTRGSKSIVIKNTDENLINHSKLAQQIFLQCPGVESLMIGDDFLTINKDRMVHWNSIKPFTEIIDLLTKQLAYGEDVISKEFHAVQEEEGEGGYKINMPKFELTEEDEEVSELIEELIDTFTRIRPAILEDGGDIDYRGWDPKTGTVYLRLQGACTSCSSSEVTLKYGIESMLKHYVDEVKFTEVIQIMDPEQEIALKEFDKLEKKLESSKNTSHEK

SEQ ID NO: 175 - protein, 258 aa, Saccharomyces cerevisiae
MINTGRSRNSVLLAHRFLSTGGFWRGGTNGTMSRTINNVDPFKLKFTFIPKTVPAAADSVSPDSQRPGKKPFKFIVSDQSKSSKASKSPKWSSYAFPSRETIKSHEFTEAIKKQNKAIDEQIAAAVSKNDCSCTEPPKKRKRKLRPRKALITLSPKAIKHLRALLAQFTPEPKLIRVSARNRGCSGLTYDLQYETEPGKFDEVVEQDGVKFVIDSKALFSIIGSEMDWFTIDDKLASKFVFKNPNSKGTCGCGESFMV

SEQ ID NO: 176 - protein, 269 aa, Saccharomyces cerevisiae
MKWLLFPARIVARTRPNLFSLYRRSVSQYLRPRTIQNLQSMAQTPELKTKLFKPLVWIDCEMTGLDHVNDRIIEICCIITDGHLAPVKAADGQGDSHYESVIHYGPEVMNKMNEWCIEHHGNSGLTAKVLASEKTLAQVEDELLEYIQRYIPDKNVGVLAGNSVHMDRLFMVREFPKVIDHLFYRIVDVSSIMEVARRHNPALQARNPKKEAAHTAYSDIKESIAQLQWYMDNYLKPPQETESVESIGSEQPESPSSSTSSLKRQRTDF

SEQ ID NO: 177 - protein, 307 aa, Saccharomyces cerevisiae
MLISSRIVRSSLVNVPLRLSRCFTQAHRACKEEEVNSPLSSAAEQPEQKYTHFGSKTVLKSTKQKLVGDVFSSVANRYDLMNDVMSLGIHRLWKDHFINKLDAGKRPNSTTPLNFIDVAGGSGDIAFGLLDHAESKFGDTESTMDIVDINPDMLKEGEKRAMEQGKYFKDPRVRFLVSNGEKLEEIDSDSKDIYTVSFGIRNFTDIQKGLNTAYRVLKPGGIFYCLEFSKIENPLMDFAYQQWAKVLPVMGSMIANDYDSYQYLVESIERFPDQETFKSMIEKAGFKSAGYESLTFGICAIHWGIKV

SEQ ID NO: 178 - protein, 441 aa, Saccharomyces cerevisiae
MRISSTLLQRSKQLIDKYALYVPKTGSFPKGFEVGYTASGVKKNGSLDLGVILNTNKSRPSTAAAVFTTNKFKAAPVLTSKKVLETARGKNINAIVVNSGCANSVTGDLGMKDAQVMIDLVNDKIGQKNSTLVMSTGVIGQRLQMDKISTGINKIFGEEKFGSDFNSWLNVAKSICTTDTFPKLVTSRFKLPSGTEYTLTGMAKGAGMICPNMATLLGFIVTDLPIESKALQKMLTFATTRSFNCISVDGDMSTNDTICMLANGAIDTKEINEDSKDFEQVKLQVTEFAQRLAQLVVRDGEGSTKFVTVNVKNALHFEDAKIIAESISNSMLVKTALYGQDANWGRILCAIGYAKLNDLKSLDVNKINVSFIATDNSEPRELKLVANGVPQLEIDETRASEILALNDLEVSVDLGTGDQAAQFWTCDLSHEYVTINGDYRS

SEQ ID NO: 179 - protein, 183 aa, Saccharomyces cerevisiae
MNSYSLLTRSFHESSKPLFNLASTLLKASKRTQLRNELIKQGPKRPTSAYFLYLQDHRSQFVKENPTLRPAEISKIAGEKWQNLEADIKEKYISERKKLYSEYQKAKKEFDEKLPPKKPAGPFIKYANEVRSQVFAQHPDKSQLDLMKIIGDKWQSLDQSIKDKYIQEYKKAIQEYNARYPLN

SEQ ID NO: 180 - protein, 706 aa, Saccharomyces cerevisiae
MDKLTPSQWKVINKSYEPASTIKVIAGPGSGKTLTLLYKVLHLITVENIKPEEILIFSLTNKAVDSIIENLLSIFENSHTNKEIVHQIGCYTVHGLANRIVVENEGMINIIEEIGWRGLMKLLPPSKRTPHHFRSYKELEKVVKDYKLNNAKNNNPVIEKLVELMDNCKVMTNDDLIIRAKKYLELDSSDSDASSFTQDLRNKYKVVLIDEFQDLYPSLAPLITMICKGKQLIMFGDTNQSIYGFLGSNNEIMSQLDNLHPKNSTTVLKLFDNFRSTPEIISLASKIINRPLAEKQIIDDTDETPSELVRKLPSGVSPQIMTFDDLAAESEFIIDKITQLICSSAKFSDIAILSRTNSHLTAIASILKKYGIPYQKLKSQPDWMDDLRIQFLLDILKVCSLASDEKHNREFNTGDKWQSNFSILVTMSALKGIGDASIQALYKACSLKNLSIWKYLTMVPNFEWPLGLSIKKKMENYTSNLYEMIENDQVHQLDDPMELLEKVASITNNLNLNPTYFQSLSDAQSSLEFKTHLQEMAQVMKVSKSNKPPGISFVKWFLETYFDQTMVFHQSQQALQTTGPGTVKLSTIHSAKGLEFPIVFLTNGSMSNFPMDTNALYVGITRARNLLYMCNMKHERLVSKSSPYSRNIMSNNLFWTYYNKDLKRSVCDVKVTHGYNVQRYNQLRKNFGFYRAYSSLRGCKSVFRRI

SEQ ID NO: 181 - protein, 285 aa, Saccharomyces cerevisiae
MKFLLQQIRNMHVKPIKMRWLTGGVNYSYLLSTEDRRNSWLIDPAEPLEVSPKLSAEEKKSIDAIVNTHHHYDHSGGNLALYSILCQENSGHDIKIIGGSKSSPGVTEVPDNLQQYHLGNLRVTCIRTPCHTKDSICYYIKDLETGEQCIFTGDTLFIAGCGRFFEGTGRDMDMALNQIMLRAVGETNWNKVKIYPGHEYTKGNVSFIRAKIYSDIGQNKEFDALEQYCKSNECTTGHFTLRDELGYNPFMRLDDRAVRLAVGDTAGTYPRSVVMQELRKLKNAM

SEQ ID NO: 182 - protein, 329 aa, Saccharomyces cerevisiae
MLRSTVSKASLKICRHFHRESIPYDKTIKNLLLPKDTKVIFQGFTGKQGTFHASISQEYGTNVVGGTNPKKAGQTHLGQPVFASVKDAIKETGATASAIFVPPPIAAAAIKESIEAEIPLAVCITEGIPQHDMLYIAEMLQTQDKTRLVGPNCPGIINPATKVRIGIQPPKIFQAGKIGIISRSGTLTYEAVQQTTKTDLGQSLVIGMGGDAFPGTDFIDALKLFLEDETTEGIIMLGEIGGKAEIEAAQFLKEYNFSRSKPMPVASFIAGTVAGQMKGVRMGHSGAIVEGSGTDAESKKQALRDVGVAVVESPGYLGQALLDQFAKFK

SEQ ID NO: 183 - protein, 344 aa, Saccharomyces cerevisiae
MTLAELLGRSRIAQVANNHKPLTYTGKKFHPTHQIIETKPSTLYRQEWGLKSAIPSKIKSRYLVYNDLDTLERITTFEPRGGTQWNRLRFQEMGVPIVSNIGRQNPFFKYISRPEDESHAKLSLFKEMKGDTDISPAAMKKRLKKITALIRSFQDEFKEWLVENHPDELKLNSNKLEDYVVKFLNKKLETKTNKKFNTEIIGTGGLSYSLPGKLKNSPNGVIQRTVVPGRILNVVKENNDNKWLAAIGGFVADVVFFQSPPSSFNSMGDFIRMKTFLFEILEASMEKNGSVSMHARLLEPQNDKTREFFNKRPIYKPLTSRRARRPSVGNIQEANNLLNIIKGN

SEQ ID NO: 184 - protein, 165 aa, Saccharomyces cerevisiae [sequence omitted]

SEQ ID NO: 185 - protein, 172 aa, Saccharomyces cerevisiae
MLKIVTRAGHTARISNIAAHLLRTSPSLLTRTTTTTRFLPFSTSSFLNHGHLKKPKPGEELKITFILKDGSQKTYEVCEGETILDIAQGHNLDMEGACGGSCACSTCHVIVDPDYYDALPEPEDDENDMLDLAYGLTETSRLGCQIKMSKDIDGIRVALPQMTRNVNNNDFS

SEQ ID NO: 186 - protein, 488 aa, Saccharomyces cerevisiae
MLRFTNCSCKTFVKSSYKLNIRRMNSSFRTETDAFGEIHVPADKYWGAQTQRSFQNFKIGGARERMPLPLVHAFGVLKKSAAIVNESLGGLDPKISKAIQQAADEVASGKLDDHFPLVVFQTGSGTQSNMNANEVISNRAIEILGGKIGSKQVHPNNHCNQSQSSNDTFPTVMHIAASLQIQNELIPELTNLKNALEAKSKEFDHIVKIGRTHLQDATPLTLGQEFSGYVQQVENGIQRVAHSLKTLSFLAQGGTAVGTGLNTKPGFDVKIAEQISKETGLKFQTAPNKFEALAAHDAIVECSGALNTLACSLFKIAQDIRYLGSGPRCGYHELMLPENEPGSSIMPGKVNPTQNEALTQVCVQVMGNNAAITFAGSQGQFELNVFKPVMIANLLNSIRLITDAAYSFRVHCVEGIKANEPRIHELLTKSLMLVTALNPKIGYDAASKVAKNAHKKGITLKESALELGVLTEKEFDEWVVPEHMLGPK

SEQ ID NO: 187 - protein, 474 aa, Saccharomyces cerevisiae
MEVTSMFLNRMMKTRTGLYRLYSTLKVPHVEINGIKYKTDPQTTNVTDSIIKLTDRSLHLKESHPVGILRDLIEKKLNSVDNTFKIFNNFKPVVTTMENFDSLGFPKDHPGRSKSDTYYINETHLLRTHTSAHELECFQKIRNDSDNIKSGFLISADVYRRDEIDKTHYPVFHQMEGATIWKRTKADVGVKEPMYIEKIREDIRQVENLLNKENVKITVDDDTIPLKENNPKQEYMSDLEVDLCSQHLKRSIELIVSEVFNKKISSMIKNKANNTPKELKVRWINAYFPWTAPSWEIEVWWQGEWLELCGCGLIRQDVLLRAGYKPSETIGWAFGLGLDRIAMLLFEIPDIRLLWSRDERFSRQFSKGLITSFKPYSKHPGSFRDVAFWLPEDKPDIHQVHENDLMEIIRNIAGDLVESVKLVDSFTHPKTGRKSMCYRINYQSMDRNLTNAEVNTLQDMVCSKLVKEYSVELR

SEQ ID NO: 188 - protein, 185 aa, Saccharomyces cerevisiae
MQAKLLFTRLNFRRPSTTLRQFPLTCFLFHSKAFYSDLVTKEPLITPKRIINKTPGLNLSISERASNRLAEIYRNSKENLRISVESGGCHGFQYNLTLEPATKPDIKNDVKDKEFSDDLDDDDSKDIIYVLPEDKGRVIIDSKSLNILNNTTLTYTNELIGSSFKIINGSLKSSCGCGSSFDIEN

SEQ ID NO: 189 - DNA, 750 bp, Glycine max
ataattttgattttattgaattttttttttatttttgccaattctatttattctttctaataatcaaaaatattctaataactaataataaaaaggaaaataaagattcattagaatattataaaataacaaataatagaacaaaacaagattctttagttatatatgtaaaacaaaaatggtttatttataagaatacatattccattctatatcaaaacaaaatataaaaatttggaatagattctatgaaatctcaaaaaatcccgctattcaattattcattaaacatatgaatattagtgcatattattttatcgattagattaaatagattatctatatatatagatagatatctatttgaattgcttcattcgcgaggagccgtatgaggtgaaaatctcatgtacggttctgtaataaagatggaattgagaaacaaccatcaattataacccccaaagaaccagatttcgtaaacaacatagaggaagaatgaaaggaatatcctatcgagggaatcatatttgcttcggaagatatgctcttcaagcacttgagccagcttggataacatctagacaaatagaagcgggacggcgggcaatgtcacgaaatgttcgccgaggtggacaaatatgggtacgcatatttccagacaaaccggttacagtaagacctactgaaacacgtatgggttcaggaaaaggttctcccgaatattgggtagctgtcgttaaacctggg

SEQ ID NO: 190 - protein, 552 aa, Pisum sativum
MNQAMATPLSLSCCSPTLTRSTLFFTKTFPFSRSFSTPLPLSTKTLISLSPPHRTFAVRAESQNGADPARQYDFDLFTIGAGSGGVRASRFASNFGASSAVCELPFSTISSDTTGGVGGTCVIRGCVPKKLLVYASKFSHEFEESNGFGWRYDSEPKHDWSSLIANKNAELQRLTGIYKNTLKNAGVKLIEGRGKIVDAHTVDVDGKLYSAKHILVSVGGRPFIPDIPGKEYAIDSDAALDLPSKPQKIAIVGGGYIALEFAGIFNGLKSEVHVFIRQKKVLRGFDEEIRDFVAENMALRGIEFHTEESPVAITKAADGSLSLKTNKGTEEGFSHIMFATGRSPNTKDLGLESVGVKVAKDGSIEVDEYSQTSVPSIWAIGDATNRVNLTPVALMEGVALAKTLFQNEPTKPDYRAIPSAVFSQPPIGGVGLTEEQAAEQYGDIDVFTANFRPMKATLSGLPDRVFMKLIVSAETNVVLGLHMCGEDAAEIAQGFAVGIKAGLTKADFDATVGIHPTAAEEFVTMRTPTRKVRKNQASQGKSDSKAKAVAGS

SEQ ID NO: 191 - protein, 735 aa, Chlamydomonas reinhardtii
MAATYSLATSPLTRSTPIPFSTKRVPSGRSSGALPVPGSQARLSGAGAVALDGLEGGRDDWHQRYSLSTSGRRRSVASGAPSNTGSSEAKNVVMASWNVTVGFSVGASSSAFSDASSFSFPARSAPAGPVARPPRTGVSLLSRALSTGEKEQDLLAHLPPVLPSTDAADPLLFFPGIPLELLREAQAEFPIFNNELLVHAYGLAARAHQNQQRKNGESLLSHCVAVAKTVAGLGLDAETVAAALLHECVDMVSRSQLEEFMPPSVVSVLEHVNTISEMSRLYRQHSATGSFSDETFQRLLVGFEDVKAVIVKLSDRLAELRTISVLPADRQAALARETLEVYSVVADRLGVWCLKAELEDLAFSVLHPQEYNWLKEAVRTRQDPVALETAINSIKGALQAQGVAYEDISGRPKNLYGIFMKLQKDGKPLTIESLNSLYDLMALRVVVAHKHECYTALRAVQSVYRVMPSRSKDFIKDIKKPNGYQSLHETVYGEGDVPVEVQIRTHKMHYIAEYGFAAHWKYKEQMDSEDEWLEKETQYKRWLTQYKLRVHDKKVRPQGSPPTDSSLKSLGVAYMDMPEEQQRGLLDPFLQHERFKLQVPAKTEVSVLLQTCDGIETKDFPLGTTANQLWRDLGLGAQPGYALTVNSRLPSGEAALQSGDLVQVLPLSTILSRSPPQSAPLAAVLEDWEEEQAHAAAEAAALAASANNYLEVYSRDGMTTWSMGPNAGAAVPAGM

SEQ ID NO: 192 - protein, 260 aa, Pisum sativum
MAAAHTPREENVYMAKLAEQAERYEEMVEFMEKVSANADSEELTVEERNLLSVAYKNVIGARRASWRIISSIEQKEESRGNEDHVDVIRDVRSKIESELSNICDGILKLLDTRLIPSASSGDSKVFYLKMKGDYHRYLAEFKTGAERKEAAESTLAAYKSAQDIANAELPPTHPIRLGLALNFSVFYYEILNSPDRACNLAKQAFDEAIAELDTLGEESYKDSTLIMQLLRDNLTLWTSDMQDDGADEIKEHAPKADEQQ

SEQ ID NO: 193 - protein, 564 aa, Arabidopsis thaliana
MEALQFSSVNRVPCTLSCTGNRRIKAAFSSAFTGGTINSASLSSSRNLSTREIWSWVKSKTVVGHGRYRRSQVRAVMFGQLTGGLEAAWSKLKGEEVLTKDNIAEPMRDIRRALLEADVSLPVVRRFVQSVSDQAVGMGVIRGVKPDQQLVKIVHDELVKLMGGEVSELQFAKSGPTVILLAGLQGVGKTTVCAKLACYLKKQGKSCMLIAGDVYRPAAIDQLVILGEQVGVPVYTAGTDVKPADIAKQGLKEAKKNNVDVVIMDTAGRLQIDKGMMDELKDVKKFLNPTEVLLVVDAMTGQEAAALVTTFNVEIGITGAILTKLDGDSRGGAALSVKEVSGKPIKLVGRGERMEDLEPFYPDRMAGRILGMGDVLSFVEKATEVMRQEDAEDLQKKIMSAKFDFNDFLKQTRAVAKMGSMTRVLGMIPGMGKVSPAQIREAEKNLLVMEAMIEVMTPEERERPELLAESPERRKRIAKDSGKTEQQVSALVAQIFQMRVKMKNLMGVMEGGSIPALSGLEDALKAEQKAPPGTARRKRKADSRKKFVESASSKPGPRGFGSGN

SEQ ID NO: 194 - protein, 525 aa, PISUM SATIVUM
  MISC_FEATURE (181)..(181): Xaa can be any naturally occurring amino acid
EFGTRNSFAREIWGLVQSKSLTSRRTDMIRPVVVRAEMFGQLTSGLESAWNKLKREEVLTKENIVEPMRDIRRARADVSLPVVRRFVQSVTDKAVGVGVTRGVKPDQQLVKIVHDELVQLMGGEVSELTFANSGPTVILLAGLQGVGKTTVCAKLATYFKKQGKSCMLVAGDVYRPAAIDXLTILGKQVDVPVYAAGTDVKPSVIAKQGFEEAKKKKIDVVIVDTAGSLQIDKAMMDELKEVKQVLNPTEVLLVVDAMTGQEAAALVTTFNLEIGITGAILTKLDGDSRGGAALSVKEVSGKPIKLVGRGERMEDLEPFYPDRMAGRILGMGDVLSFVEKAQEVMLEEDAEDMQKKIMSAKFDFNDLLKQTRTVAKMGSVSRVLGMIPGMAKVTPAQIREAEKNLQFMEVIIEAMTPEERGKPELLAEFPVRRKSVAQESGKTEQQVSQLVAQLFQMRVRMKKLMGVMEGGSMPTLSNLEEALKANKKAPPGTARRKKKGGLKRLFKGRSSKISLPAPRGFGSKN

SEQ ID NO: 195 - protein, 376 aa, Arabidopsis thaliana
MQKVFLAMDTCALVIHQSLSRIKLSPPKSSSSSSSSSSAFSPESLPIRRIELCFRGAICAAVQRNYEETTSSVEEAEEDDESSSSYGEVNKIIGSRTAGEGAMEYLIEWKDGHSPSWVPSSYIAADVVSEYETPWWTAAKKADEQALSQLLEDRDVDAVDENGRTALLFVAGLGSDKCVRLLAEAGADLDHRDMRGGLTALHMAAGYVRPEVVEALVELGADIEVEDERGLTALELAREILKTTPKGNPMQFGRRIGLEKVINVLEGQVFEYAEVDEIVEKRGKGKDVEYLVRWKDGGDCEWVKGVHVAEDVAKDYEDGLEYAVAESVIGKRVGDDGKTIEYLVKWTDMSDATWEPQDNVDSTLVLLYQQQQPMNE

SEQ ID NO: 196 - protein, 364 aa, Spinacia oleracea
MACSLSFSSSVSTFHLPTTTQSTQAPPNNATTLPTTNPIQCANLRELRDRIGSVKNTQKITEAMKLVAAAKVRRAQEAVVNGRPFSETLVEVLYNMNEQLQTEDVDVPLTKIRTVKKVALMVVTGDRGLCGGFNNMLLKKAESRIAELKKLGVDYTIISIGKKGNTYFIRRPEIPVDRYFDGTNLPTAKEAQAIADDVFSLFVSEEVDKVEMLYTKFVSLVKSDPVIHTLLPLSPKGEICDINGKCVDAAEDELFRLTTKEGKLTVERDMIKTETPAFSPILEFEQDPAQILDALLPLYLNSQILRALQESLASELAARMTAMSNATDNANELKKTLSINYNRARQAKITGEILEIVAGANACV

SEQ ID NO: 197 - protein, 147 aa, Spinacia oleracea
MAATTTTMMGMATTFVPKPQAPPMMAALPSNTGRSLFGLKTGSRGGRMTMAAYKVTLVTPTGNVEFQCPDDVYILDAAEEEGIDLPYSCRAGSCSSCAGKLKTGSLNQDDQSFLDDDQIDEGWVLTCAAYPVSDVTIETHKEEELTA

SEQ ID NO: 198 - protein, 147 aa, Spinacia oleracea; identical to SEQ ID NO: 197

SEQ ID NO: 199 - protein, 364 aa, Spinacia oleracea; identical to SEQ ID NO: 196

SEQ ID NO: 200 - protein, 179 aa, Oryza sativa (japonica cultivar-group)
MAMASTAVSSTLPLFHVRTASSAPAALRFTTRGRGGGRHSVACNSTAASSPKVLELGDAIAGLTLEEARGLVDHLQERLGVSAAAFAPAAVVAAPGAAGGGEDGAPAEKTEFDVVIEEVPSSARIATIKVVRALTNLALKEAKDLIEGLPKKAKEAVSKEEAEEAKKQLEEVGAKVSIA

SEQ ID NO: 201 - protein, 185 aa, Oryza sativa (japonica cultivar-group)
MASTALSSAFSLLSLPSSSSPAAAAAAAPRSFAVPSRARPRRAVAVVASTATESPKVLELGDAIAGLTLEEARGLVDHLQERLGVSAAAFAPAAVVAAPGAGGAGAAADEAPAEKTEFDVVIEEVPSSARIASIKVVRALTNLALKEAKDLIEGLPKKVKEGVSKDEAEDAKKQLEEVGAKVSIA

SEQ ID NO: 202 - protein, 1259 aa, Pisum sativum
MPMAASTSTSSLSVVGTNLSLPPHRHHRHFHSPSSISTRIRTNRLFLSSSLAFSSPRDARVVHAGLGLRRNTPDVWKHYSSVLSQPTAPVPVRQSCTSCCLASAKKRRSNLPRFVPGAFFDSSSFGLSKDKLRHASVKRVQLPHATVGPDEPHAASTTWQEGVAEKQDLSLFDSELERLEGFLGSELPSHPKLHRGQLKNGIRYLILPNKVPPTRFEAHMEVHVGSIDEEDDEQGIAHMIEHVAFLGSKKREKLLGTGARSNAYTDFHHTVFHIHSPTSTKDSDDLLPSVLDALNEITFHPNFLASRIEKERRAILSELQMMNTIEYRVDCQLLQHLHSENKLSKRFPIGLEEQIKKWDADKIRKFHERWYFPANATLYIVGDIGNIPKTVNQIEAVFGQTGVDNEKGSVATSSAFGAMASFLVPKLSVGLGGNSIERPTNTTDQSKVFKKERHAVRPPVKHTWSLPGSSANLKPPQIFQHELLQNFSINMFCKIPVNKVQTYRDLRIVLMKRIFLSALHFRINTRYKSSNPPFTSVELDHSDSGREGCTVTTLTITAEPKNWQNAIRVAVHEVRRLKEFGVTQGELTRYLDALLRDSEHLAAMIDNVSSVDNLDFIMESDALGHKVMDQSQGHESLIAVAGTVTLDEVNSVGAQVLEFIADFGKLSAPLPAAIVACVPKKVHIEGAGETEFKISSTEITDAMKAGLDEPIEPEPELEVPKELVQSSTLQELKNQRKPAFIPVSPEIEAKKLHDEETGITRLRLANGIPVNYKISKSETQSGVMRLIVGGGRAAEGSDSRGSVIVGVRTLSEGGRVGNFSREQVELFCVNNQINCSLESTEEFISLEFRFTLRNNGMRAAFQLLHMVLEHSVWSDDALDRARQVYLSYYRSIPKSLERSTAHKLMVAMLDGDERFTEPTPSSLENLTLQSVKDAVMNQFVGNNMEVSIVGDFTEEEIESCILDYLGTAQATGNFKNQQQIIPPTFRLSPSSLQSQEVFLNDTDERACAYIAGPAPNRWGFTADGNDLLETIDNASSVNNNGTKSDALQTEGAPRRSLRSHPLFFGITMGLLSEIINSRLFTTVRDSLGLTYDVSFELNLFDRLKLGWYVVSVTSTPSKVHKAVDACKNVLRGLHSNGITVRELDRAKRTLLMRHEAEIKSNAYWLGLLAHLQSSSVPRKDLSCIKDLTSLYEAATIEDTCLAYEQLKVDEDSLYSCIGVSGAQAAQDIAAPVEEEEAGEGYPGVLPMGRGLSTMTRPTT

SEQ ID NO: 203 - protein, 332 aa, Arabidopsis thaliana
MAASLQSTATFLQSAKIATAPSRGSSHLRSTQAVGKSFGLETSSARLTCSFQSDFKDFTGKCSDAVKIAGFALATSALVVSGASAEGAPKRLTYDEIQSKTYMEVKGTGTANHSPTIDGGSETFSFKPGKYAGKKFCFEPTSFTVKADSVSKNAPPEFQNTKLMTRLTYTLDEIEGPFEVASDGSVNFKEEDGIDYAAVTVQLPGGERVPFLFTVKQLDASGKPDSFTGKFLVPSYRGSSFLDPKGRGGSTGYDNAVALPAGGRGDEEELVKENVKNTAASVGEITLKVTKSKPETGEVIGVFESLQPSDTDLGAKVPKDVKIQGVWYGQLE

SEQ ID NO: 204 - DNA, 255 bp, Oryza sativa
gagcagtcggtgtcccccggcggcggcgcgtggctcggcgggcagctgttctccgccatggtggtgcgcaagccggcgcacctgttcctcgacgagctcggcgtcgcgtacgacgagcaggaggactacgtcgtcatcaagcacgccgcgctcttcacctccaccgtcatgagccgcctcctggcgcgccccaacgtgaagctgttcaacgccgtcgccgtcgaggacctcatcgtcaaggagggccgcgtcggc

SEQ ID NO: 205 - DNA, 606 bp, oryza sativa (japonica cultivar-group)
  misc_feature (349)..(349): n is a, c, g, or t
cagagcaagaagctcagctcctcctcctctcgcatggcagccatggccaccaccgcgtccagcctcctcaagacctccttcgccggcgtgcgcctccccgccgccgcccgcaaccccaccgtctccgtcgcgccgcgcaccggcggcgccatctgcaactccatctcgtcgtcgtcgtccactcccccctacgacctcaacgccatcaggttcagccccatcaaggagtccatcgtgtcccgcgagatgacccggcggtacatgaccgacatgatcacctacgccgacaccgacgtcgtcgtcgtcggcgccggctccgcggggctctcctgcgcgtacgagctctccnaggacccctccgtcagcgtcgccgtcatcgagcagtcggtgtcccccggcggcggcgcgtggctcggcgggcagctgttctccgccatggtggtgcgcaagccggcgcacctgttcctcgacgagctcggcgtcgcgtacgacgagcaggaggactacgtcgtcatcaagcacgccgcgctcttcacctccaccgtcatgagccgcctcctggcgcgccccacgtgaaactgttcaacgccgtcgccgtcgaggacc

SEQ ID NO: 206 - DNA, 741 bp, TFAM Sequence
atggcgtttctccgaagcatgtggggcgtgctgagtgccctgggaaggtctggagcagagctgtgcaccggctgtggaagtcgactgcgctcccccttcagttttgtgtatttaccgaggtggttttcatctgtcttggcaagttgtccaaagaaacctgtaagttcttaccttcgattttctaaagaacaactacccatatttaaagctcagaacccagatgcaaaaactacagaactaattagaagaattgcccagcgttggagggaacttcctgattcaaagaaaaaaatatatcaagatgcttatagggcggagtggcaggtatataaagaagagataagcagatttaaagaacagctaactccaagtcagattatgtctttggaaaaagaaatcatggacaaacatttaaaaaggaaagctatgacaaaaaaaaaagagttaacactgcttggaaaaccaaaaagacctcgttcagcttataacgtttatgtagctgaaagattccaagaagctaagggtgattcaccgcaggaaaagctgaagactgtaaaggaaaactggaaaaatctgtctgactctgaaaaggaattatatattcagcatgctaaagaggacgaaactcgttatcataatgaaatgaagtcttgggaagaacaaatgattgaagttggacgaaaggatcttctacgtcgcacaataaagaaacaacgaaaatatggtgctgaggagtgttaa

SEQ ID NO: 207 - protein, 16 aa, artificial sequence
  transportan
RQIKIWFQNRRMKWKK

SEQ ID NO: 208 - protein, 291 aa, artificial sequence
  synthetic sequence
MRRRRRRRRRRRGEGDIMGEWGNEIFGAIAGFLGGEMAATQLTASPVTMSARSLASLDGLRASSVKFSSLKPGTLRQSQFRRLVVKASSVLASCPKKPVSSYLRFSKEQLPIFKAQNPDAKTTELIRRIAQRWRELPDSKKKIYQDAYRAEWQVYKEEISRFKEQLTPSQIMSLEKEIMDKHLKRKAMTKKKELTLLGKPKRPRSAYNVYVAERFQEAKGDSPQEKLKTVKENWKNLSDSEKELYIQHAKEDETRYHNEMKSWEEQMIEVGRKDLLRRTIKKQRKYGAEEC

SEQ ID NO: 209 - protein, 262 aa, artificial sequence
  synthetic sequence
MRRRRRRRRRRRGEGDIMGEWGNEIFGAIAGFLGGEMFRSMLVRSSASAKQAVIRRSFSSVLASCPKKPVSSYLRFSKEQLPIFKAQNPDAKTTELIRRIAQRWRELPDSKKKIYQDAYRAEWQVYKEEISRFKEQLTPSQIMSLEKEIMDKHLKRKAMTKKKELTLLGKPKRPRSAYNVYVAERFQEAKGDSPQEKLKTVKENWKNLSDSEKELYIQHAKEDETRYHNEMKSWEEQMIEVGRKDLLRRTIKKQRKYGAEEC

SEQ ID NO: 210 - protein, 271 aa, artificial sequence
  synthetic sequence
MRRRRRRRRRRRGEGDIMGEWGNEIFGAIAGFLGGEMPTEERVRKRKESNRESARRSRYRKAAHLKCSSVLASCPKKPVSSYLRFSKEQLPIFKAQNPDAKTTELIRRIAQRWRELPDSKKKIYQDAYRAEWQVYKEEISRFKEQLTPSQIMSLEKEIMDKHLKRKAMTKKKELTLLGKPKRPRSAYNVYVAERFQEAKGDSPQEKLKTVKENWKNLSDSEKELYIQHAKEDETRYHNEMKSWEEQMIEVGRKDLLRRTIKKQRKYGAEEC

SEQ ID NO: 211 - protein, 227 aa, PTD-NLS-TFAM Peptide
MARRRRRRRRRRRPKKKRKVEDPSSVLASCPKKPVSSYLRFSKEQLPIFKAQNPDAKTTELIRRIAQRWRELPDSKKKIYQDAYRAEWQVYKEEISRFKEQLTPSQIMSLEKEIMDKHLKRKAMTKKKELTLLGKPKRPRSAYNVYVAERFQEAKGDSPQEKLKTVKENWKNLSDSEKELYIQHAKEDETRYHNEMKSWEEQMIEVGRKDLLRRTIKKQRKYGAEEC

SEQ ID NO: 212 - protein, 246 aa, Homo sapiens
MAPLASMTGVLSALGASGAGLCTGCGSALASPPSPVTLPATPSSVLASCPLLPVSSTLAPSLGGLPIPLAGAPAALTTGLIAAIAGATAGLPASLLLITGAATAAGTGVTLGGISAPLGGLTPSGIMSLGLGIMALHLLALAMTLLLGLTLLGLPLAPASATAVTVAGAPGGALGASPGGLLLTVLGATLALSASEKELYIGHALGAGTATHAGMLSTGGGMIGVGALALLAATILLGALTGAGGC

SEQ ID NO: 213 - protein, 243 aa, Mus musculus
MALFRGMWSVLKALGRTGVEMCAGCGGRIPSSISLVCIPKCFSSMGSYPKKPMSSYLRFSTEQLPKFKAKHPDAKLSELVRKIAALWRELPEAEKKVYEADFKAEWKAYKEAVSKYKEQLTPSQLMGMEKEARQRRLKKKALVKRRELILLGKPKRPRSAYNIYVSESFQEAKDDSAQGKLKLVNEAWKNLSPEEKQAYIQLAKDDRIRYDNEMKSWEEQMAEVGRSDLIRRSVKRSGDISEH

SEQ ID NO: 214 - protein, 244 aa, Rattus norvegicus
MALFRGMWGVLRTLGRTGVEMCAGCGGRIPSPVSLICIPKCFSSLGNYPKKPMSSYLRFSTEQLPKFKAKHPDAKVSELIRKIAAMWRELPEAEKKVYEADFKAEWKVYKEAVSKYKEQLTPSQLMGLEKEARQKRLKKKAQIKRRELILLGKPKRPRSAYNIYVSESFQGAKDESPQGKLKLVNQAWKNLSHDEKQAYIQLAKDDRIRYDNEMKSWEEQMAEVGRSDLIRRSVKRPPGDISEN

SEQ ID NO: 215 - protein, 446 aa, Arabidopsis thaliana
MSTVSSDPAHAKKSRNSRKALKQKNEIVESSPVSDKGKETKSFEKDLMEMQAMLEKMKIEKEKTEDLLKEKDEILRKKEVEQEKLKTELKKLQKMKEFKPNMTFAFSQSLAQTEEEKKGKKKKKDCAETKRPSTPYILWCKDNWNEVKKQNPEADFKETSNILGAKWKGISAEEKKPYEEKYQADKEAYLQVITKEKREREAMKLLDDEQKQKTAMELLDQYLHFVQEAEHDNKKKAKKIKDPLKPKQPISAYLIYANERRAALKGENKSVIEVAKMAGEEWKNLSEEKKAPYDQMAKKNKEIYLQEMEGYKRTKEEEAMSQKKEEEEFMKLHKQEALQLLKKKEKTDNIIKKTKETAKNKKKNENVDPNKPKKPTSSYFLFCKDARKSVLEEHPGINNSTVTAHISLKWMELGEEEKQVYNSKAAELMEAYKKEVEEYNKTKTSS

SEQ ID NO: 216 - protein, 204 aa, Caenorhabditis elegans
MLGTISMRFFATKVVAPRASVAASTPQVPLGMNINPYAMFIKENFKANTSDMKRTDLMKELSGKWKALSISEKDKYTELSKNYNAQKLDDFMKLSTEEQKKLVDSAKEKKAERASRRHAKERREKRKQSGRPSVPPSAYALFIKEKLSGAGMESKEKMKEAVAQWKAFTDSQKKKYTDEAKKLKDEYHVVLQKWEAEQKENADQ

SEQ ID NO: 217 - protein, 257 aa, Drosophila melanogaster
MIYTTTLMSSRGGLIGSLINKVRPLAAASISNTPAVPSKTLEEQLGLPPRPKKPLTPYFRFMREQRPKLKAANPQITTVEVVRQLSKNWSDADAQLKERLQAEFKRDQQIYVEERTKYDATLTEEQRAEIKQLKQDLVDAKERRQLRKRVKELGRPKKPASAFLRFIASERINTPQGDKQTYREWHQKTTAKWTRLSDSEKEVYMQESRKEMELYRKAISVWEEKMIRLGHIDVVRHGNLIDPPEPKPRKTLASKDI

What is claimed is:

1. A method for transfecting a plant:
contacting one or more cells with a polypeptide comprising a protein transduction domain.

2. The method of claim 1, wherein the polypeptide is a vector.

3. The method of claim 2, wherein the polypeptide is a non-viral vector.

4. The method of claim 3, wherein the non-viral vector further comprises a targeting signal.

5. The method of claim 4, wherein the non-viral vector further comprises one or more HMG boxes.

6. A method for transfecting a plant cell:
contacting one or more plant cells with a polynucleotide packaged with a non-viral vector, the non-viral vector comprising a protein transduction domain operably linked to a polypeptide comprising one or more HMG boxes, wherein the one or more plant cells comprise one or more plant organelles, and wherein the polynucleotide is expressed in the one or more organelles.

7. The method of claim 6, wherein the plant organelle is selected from the group consisting of a plastid, mitochondrion and nucleus.

8. The method of claim 4, wherein the targeting signal comprises a mitochondrial localization signal sequence having 80-100% sequence identity to a mitochondrial localization signal selected from the group consisting of hexokinase I, amine oxidase (flavin-containing) A, hexokinase IV, pancreatic beta cell form, peripheral benzodiazepine receptor-related protein, metaxin 2, putative mitochondrial outer membrane protein import receptor (hTOM), glutathione transferase; voltage-dependent anion channel 2 (outer mitochondrial membrane protein porin), hexokinase IV, cytochrome b5, peripheral benzodiazepine receptor, germ cell kinase anchor S-AKAP84, A kinase anchor protein, carnitine O-palmitoyltransferase I precursor, hexokinase II, amine oxidase (flavin-containing) B, long-chain-fatty-acid-CoA ligase 2, long-chain-fatty-acid-CoA ligase I (palmitoyl-CoA ligase), voltage-dependent anion channel 1, metaxin 1, Human putative outer mitochondrial membrane 34 kDa translocase hTOM34, voltage-dependent anion channel 4 (outer mitochondrial membrane protein porin), cytochrome-b5 reductase, voltage-dependent anion channel 3 (outer mitochondrial membrane protein porin), Mitochondrial import receptor subunit TOM20 homolog (Mitochondrial 20 kd outer membrane protein) (Outer mitochondrial membrane receptor TOM20), tumorous imaginal discs homolog precursor (HTID-1), and SEQ. ID Nos. 18-188.

9. The method of claim 5, wherein the polypeptide comprises a portion of TFAM effective to bind the polynucleotide.

10. The method of claim 6, wherein the contacting occurs in vitro or in vivo.

11. The method of claim 4, wherein the targeting signal comprises a plastid localization signal sequence having 80-100% sequence identity to a plastid localization signal selected from the group consisting of Transit peptide domain of the apicoblast ribosomal protein S9, Pea glutathione reductase (GR) signal peptide, NH2-terminus of Cr-RSH encoding a putative guanosine 3′,5′-bispyrophosphate (ppGpp) synthase-degradase, 14-3-3 proteins, Chloroplast signal recognition particle including cpSRP54, cpSRP43 subunits or a fragment thereof, Chloroplast transit peptides from Table 2, AtOEP7, in particular the transmembrane domain (TMD) and its C-terminal neighboring seven-amino acid region, and THI1 N-terminal chloroplastic transit peptide.

12. A method for delivering a polynucleotide into a plant nucleus comprising:
contacting a plant cell with a polynucleotide packaged with a non-viral vector comprising a protein transduction domain operably linked to a polypeptide comprising one or more HMG boxes and a nuclear localization signal, wherein the polynucleotide encodes at least one polypeptide.

13. The method of claim 6, wherein the polypeptide comprises a portion effective to bind the polynucleotide comprising at least 80% sequence identity with TFAM.

14. The method of claim 6, wherein the polynucleotide expresses a nuclease capable of cleaving an endogenous organelle genome.

15. The method of claim 6, wherein the polynucleotide expresses at least one polypeptide capable of imparting microbial resistance or a biosynthetic route for an antibiotic, or providing increased resistance to environmental stress, drought, flooding, temperature extremes, nutrient deficiency and pollution or to absorb environmental pollutants.

16. The method of claim 6, wherein the polynucleotide expresses at least one polypeptide capable of increasing the efficiency of photosynthesis compared to a control or increasing the efficiency of oxidative phosphorylation compared to a control or enabling C3 plants to fix CO2 as in C4 plants.

17. The method of claim 6, wherein the polynucleotide is expressed in an organelle to produce a biologically functional protein, and wherein the protein is exported out of the organelle.

18. The method of claim 6, wherein the polynucleotide expresses at least one polypeptide capable of converting hard-to-ferment sugars to more easily fermentable sugars or modulating the cellulose content of a plant or promoting starch hydrolysis.

19. The method of claim 6, wherein the polynucleotide expresses at least one polypeptide capable of accumulating useful oils, rubbers and biomaterials such as biofuels in plant cells.

20. The method of claim 6, wherein the polynucleotide expresses at least one polypeptide capable of fixing environmental nitrogen into organic nitrogen such as nitrogenase or modified forms thereof.

21. The method of claim 6, wherein the polynucleotide expresses at least one polypeptide with pharmaceutical or therapeutic utility.

22. The method of claim 6, wherein the polynucleotide comprises a multicistronic operon.
